United States Patent Application Publication US 2026/0357256 A1 - sequence listing, part 7

SEQ ID NO: 9 - DNA, 58617616 bp, Homo sapiens (residues 13,026,139-15,197,161 of 58,617,616)
  source 1..58617616: mol_type = genomic DNA
ggagctgttttggctgggatttggctgtcagtatgaaagtaatttgatttcatagagagtgaaaacaaggacgagattccttgagctctttcccttctccttatttcagctaaagtggcaaggcctcaggatggatgcccacagccctggcactggggagcagagaggctttctcggggcacaggcatggcagggagcagcgttgctgtggaagaggtcttaaacaagcaaacaaacaaaccaaaaaaaaaaaaaactctgtaaaatctccttttccttttgtgttccaagtagttctgcttctcttcgcttttccagttttaccctgcattttgggtcagggtggtttagttctcctcctctgttccttttttcccttaccctttccctttttataatttctttccgcttttgttttcttacaaattgaaacagagatggctggttaatttttagcctccactcagctacgcccaatttactgccgcctttgaaacctaaacgggcggcactctgtgattaagcaaggcagaagtgtgtttacattatgcccaaccaacttgtaatgagagggctaccaaacctttctctctctctctctctctctgtgtgtgtgtgtgtgtgtgtgtgtttcctttccaccattccagtattttttccccttcattttccttcttcctctctttatgcgaatttgagagaatgtggcttaacttcaactctcgcaaaggttgtttctccgcgagtgtgtgtctctgtgtctttcttcctgttcattcacaaaaaagaaaagtgattcacaatggctgtggtcacccccttgcctgtttgggaagttgggaggaatgatataactggatccagaaataaaattcgggtttgggggtgctttcagcactgcgtcaggaatgtaatctagactagagtgagccctgagtttacatgttggagaactgtggagaggagaaggtggtattggaattcttgtcctgagaggttgctttggtaactggttagaagcaggggacaccactctcaccccccaagtctctacctacttctgtggatctttctaggcctgcatccggccctgtgtgaccatcgtgacccgtcatgcagaagggccaggtgccagtcattccccctcccttcagcttgaattttttcttttgtcttttttctttttggaaaacagactgagagggaaaaaaaagttatcccctcattctctgtctatacagcaagccagatttgggagggtgtgtgcctggtagtattggaggtgactggtggcttgcagaaggctcggagcctcgagcttaccagtgtggccatcagatactcctgcacaaggggattctgcaccttccaattttagaaccaggggctcgagagcatctaagatgaaaatcaacactcatcttcctctgagctggcttcctccaaccccgctctctgactggatccttgtagctgagttgtttccctggcctcttttattttaggccgaattcttgactgctgccagtgtggggctaaggtaggatgaaaagtatgtgaggaagcagaccgtttcctggccagaagaaaggccccaccatgcctccctgccagcttaagagatcattcgcccaggaatatgagtgaattcataccccattccatgtagccgaggccacttctctgggctggggctgaggccgagtctcctctacaaaagcagagtagggaactaagggtgtattttatatcattcaggccccagactccagataatttcagtgaaggtaggatttttctcactggaattgctttagtttgagtgtgccttcctgaagtgagttgaggcgagttggcgcagcccgggccaccagtgggctgcatcacttgttcctctttggagttgggttgggtggtcttgagatggcacagaccaggcatggcttgcttcctccttgagctggcaagaaataaaaacatttcttgctttgctagaaaatgtcttctgtggctgagccaccaaagagcatcgatctgtgggcaccactttctccatgcccatgcctgccaggcacactcagcagagctgccacttgctccttccttccaggatgataaactggggacaggggccgggatggcacaggctcagacaagagctgctttggactctgaaataagtgtttttccttttcttaagacagggctgaagagccagatctgggctgagctgggggtcctgggtttcatgacagtaacggtgatgtggtggtaaatgtgggggtgtggctttgctcccaggtgccattgtcacccatggccttcctgagcccttgttatgtcccagatgaagcttcaagagatgacatgttcgagagggaataaaggacgtgtgtttggcgttgaaactccactcccagaatactgggtccaaatacagaatactaggtccaaaaggctgccatgcggctggccttcctgctgggaaggagtctgtctgtgtgtctgtctgtgtttaggaagggaggttgaggcagggcagggtcagagagcactgccgtggggaggagggtatccatttcctggtgatatccttccattcaaagcgggtatcccagaacaggtggccagggacgggtgagctggggagggccaggagagagatctctgcttgtgtgagaaaggatggccgagctggcctagaaccgctgctagactatctccaaagtttctgcagcaccctgaaggtgaaccagtgccttcagaccttccctgacacctaagccttggtcctaggaaagaaaaaaaaaaatccaaagctaacaaaatacttgagcgaatggaactgtcagcgtcaccctgtcagatccctcctgtgcgcctgcagcggaatccccacgaagtccaggtatttgagtggtggctcttttctttatctaaactctttaatgatggagagcttcccacatagaaagaactcctgtgtacccaccactagtgccagcaatcgccagatcacggccaatctcaattcaaccatcctcccaactgcccacccatgctgagttatttagaagatccaggcattatagcttttcatctgtaaatgtttttgtgcacatctctaaagatacggactcttgaaaaaccaaaccacaataccactattatacccattaaaaattcagcatttttttttagtatcatcagatactggttaatgttcacatttccctaattatcacttaattttttgtttatagtttgtttgaatcaggatccagatggggtcagtcctgcattgcgatgggttgatcagtctcaaaagactcatcataatctctaggtagtccttctcctcttcctcttccttagtcttggtttcttttctggcagttgtcattgttgttgtcgttgaaggaaacaggttgtttgtcctgtggggtttcctcagctggactctgcaggctgcgctgccccgagtgattcagtgagtgtggtgctctgagagcagattcggcctcccctccctccctaccttcaggtcccgggacagctgagcttagccttacctgtcgcaggaaatgggttagcacctgaagatttgtctaagtgaactttttcacctgtggggttgccttctcaggtatgagagcttcttggtttcggcactctagtttagggtttggggctttgtagcaggcactagttttcaggtctgagggagggctgcccatccacgtccttccttggcggtggagggcattgttcagctgtgtccatactgccaagacggggctggtgccagcgaggttccccaagcctttgctggatgcccaacccgactgttggctctggggtgagtatgtgggagggtccacaggagcacccgccgctttctccaggtccacccccaccatggaccctgtgccgcctcatccattgcctcctttttcaaggcccagaaatgccactggtctgcgtctttgaggcagcgccatctggtgccagggctgacaaagatcgcagggccctggaactgacgcctaaaattagcaggatctacagattatcttttaacccaatgtagggtcccctttagaacatcccagaagaggtgtcactgtcattcaaaggtcagctttggttgtaaaattcttccattcttccatgtctagcttgtaggatggttccagggattaaaccagctaatatgtaaagataccggcacatagcaggacggcagctgctgtgattgaggacaattgttatgatttagggagcccaaggctgactctctgtcacctttacttgttggtcttttttttctcttaagggatgacccaggtgaaagctgattttcctgtaacaggacagcatttgaaataccaaaggcagctcttatgtctcccttccacccttctccccaggaagctgtctcctctccagcctgaatatcaccagtccctaatgcctcccacatttcacatggctcctagtgcccttgccattttggtaaccacctcctggaagccctctggtttgttttggtccctctgattcataaaatttctgaaactggagtgttcagaattgaacacagaaactccaagcatgatcagatcctagccagccatggtggctacataattttcagggccttccagctacatactgtgcagggctcagtgcaaaatgaaaatgtggggctccttgttcaaaatttttaggaattacagcacgacatcagttagagcatttaaccaagcgtggggggcacgcaagttgcacacccgtgaagctggccctggccacctttgttttggacattcgtgtctgttaatacaacttggggtgctgggtctgggtgatgtggaataatgatggggctcaggctggcctcagagcggggcatgaccccaaagaggagaacagaaatgcccagacccaatccttatgcttgggcttggtcttattctcagactcctttgaccacctgctcttgtcccttttgttcatagtgctgtccacccaaccagtcaagagctcccattgcctacaacatgcagggggtttctcagtagagtgcttgctctgctggctgaattggaggctatgacatgggggaaaaaagagtcacctttgtcggagcttgagccagcaaagcgccgaccgtgaacaagccagaggggacctagaggcctgatcccataattatgggcatggtgaccagccgtgctctattgctgacccagaggaaacagggctactctgcagcagaagggctggggtccagacgtgcagaaggacttcctgagaacttggtttactttttggcgcttccaaagcatggtagaattccctttatccatgaaatgcacacttagtcaacttactgtgagcaaggtcctggcctaggggttcctagatctctaagaataagagaatcttgcgtgtacctggcaggctttgggtaaaggcccgatgatatcttctagaaggcttcctcccgtaggcgtaggcgtgaacctgcagtgacccatgctggaggggagggaaagcccaaagggccttatttgggggatagctcacagtgggctgtgaattgggaggcaaggtccttcttggccaccctctagtgttacagagacctgggatgccagaggaagagtgggttagaaggggtaatgaggccagtgctacgttctccctctgtcctggcttcctgtagcagctgggcagagaggggacagctgagtgtccccttttctgcctagggaagaaggtgactccctccccacccctttttctctttgccctgtccgtcccatccctccacccccgcccttctgtctcaggagctgccacgcttcagttattttatccttcagtgtccgattcagaagtcttttcaaaggccccagccgtgtcagcgcggtgctcgcacaaaaggcctctttgatttcttgtttgttttcatttgccagtggagggggaggggggcaggagagaaagagcttctgggttttaaaatttttatttgggttgcttcattctcagaggagttggctccctggaactcctttctgagttgggggctcagagttgaacggcagccttctgaagagagggctagtgtaggagtggagggttgggtggagctcccagggtgacaggaggaggtgtaggggtttaaatatagttattgattcatcctacaaacactttgggcagatcttatgtgctaggcctaagggcagccctgcctgttgggtagaggaaaggtctgaggtgtctggcacatgacattcccctgtgtgttgcatcgttcgaggactcctcacagctgtggatttgcacagttgtgaactttgactttgttatttttccttttttgtcccagattccgcctttgaagggattctactagcatacacacttcttggagactcagtacttcagaatacaggttggggcttcccaccctaaatcagagaatgagggagagggagtgagaggtttatagagcagctaggtgtcttcctgggaatggtgtgcagaggacctgggcccacagcttgttttggactttgagggcaggtcagtgctgctgagaccttggtgagtagggagttgaggccaaaaagaaatggaaggccatgtttgtccaaggtttcgaacaagagacacccaaaccagtgcctgttggggtgcgtaccttaacacatgtgggcacgtccctatatcccagtaagaagaggtgcagcctgctggtttacatgcctgtatggaggcctaattgtcagggcttgggaagagagtgccacagaccgagactcaggcaggtggtcacgggcatcagcaacagggaagtgtgcccattgggtgagggggggctcacagggcctggttggcagacgggaggaggaggctggggggctgagagatagataaatatagctgatggcatttctgatgataggtttttcttggcaccaagggcaccgtggaaaacagcacgacaaacgcccggccctgcaggccgccgtcgccattttaagcatgtttgagtttaagggttgttggcgttagaatagggtcccaggaggaggagggcctagggaggagaagtttggctggactggaccttaccccccaggtgcctgggtcccttactttgtctataatggatatctcgtaccttatttcctggccctttggggatttaaaaaatattctggggctgccctttatgggtctgtctcccaagtgacttatttcaccaccagctgccatggactatcagtagggggcatcttggctcttctctcactcctgatgccttactgatgacatggcatgccaccaccaccccagtacagggtacttattagctgttatttggggacacccaataacttaaggggcacctgtttgtccaggctcctaacaacttcttgtcccctgtgggcatgcccttggtctctatcccctgctttaattccatttttccattgaaggccctctatggctttagcaccaggctaagtcctctctatgtattaattccctgaattctcaccctgattctagttttaagcctgtgctcctggctgggtgtgtgtgcactcaggtgatgtgcataatatgtgtagtgaggaatcagcaaaccagacctggggaccagggaggcttcctagaagacgacctacttgacctgcaccttgaaagacagtgaggaattagctcgttttgtcagctgcctgagccttctcagtgtgcctggagctgattccctcctcacaatggttgagtgatatagacagggcaggtattattgtatctactgtacagaggaggacccgaagtacagagatgacaggggactctggtcacatgatgagtttctggcagaaggggccggcttctaggtcactgagtacctggagctcattctgagggcatcgctgctccttgaacttcatcaggattactggctttggcagagtctcagaggagaaaacctcaagggtccctgttggagccagtttcatcattgtggtctctgtcactctctagaagagagcccagcttgcggctcagctcaagggctcccccagtggctgagtatgtggggtggaaacagagaatgggcacctggccctgtcctgacactggcctccctccctcctgacaggccatggctccctggatccctgccaccaacctcgagaggcagcatgctagcatagacgggctgagtctagcatagacaggggccaggttggctggatgctctcaccctgctgcagccagctctgcttcttttcatatctccctggagcatgggggagggatcccacctgaccttctcaggtagaggaggcaggaagtctaggtgtgaggccaggcaggttctgctagaccttgggattcctgatccttgcactgtcacacccttttcctgggagtgtccttggaatcagtttgaaataaaaatgaatgtaattatcataattaaccaggtgatcgctggaagttttacaataatctgctactcattgcctttttcacttcttcacattgactctcacctttatccctttcttaaagttggaaaactctcggggtgtgtatataaaaactctcctagcatgactaaggctgggttcagggagaggctggctcaccgctctagattttcgtctgtgtccatgataattagacagaggcttacctctcaccattgatatcagctccccttgagcagcatttcccaactgcggaactgttgacattcgagtgagatcattctgtgtcttgggggactgtcttggacattgtagagttttagcggaatctctggccttgacccgctagaaatcagttgcacctccctccccaaggtgtgacaaccaaaaatatctccagacatttctaagagttccctgggaacagaatcatgcatggctgagaacctctggcctggaagaaacagggattcagacagaatgccacctgtgttcacctcttgcctcaccgccagtttaggtcctcatttaccttgtgttgaatgtcgactgaacctctgagcatcgtctactcctgtgtgtcctgtgttgttttcgcttttccggatagcagagccctgggctgaagcagtttgggggctttcccctttcacctccccctggttggaactgtaagcctgcctccaagtcccctactgagttattcctctctgattttttgcatagtggtctctgtgtgctggggctgctgatctggggaacaggacaggggatctgctactgggctgacccaggcctgtgcagcaaccggtaatcctgtcaggcccgtatcagaccccaaagaacagcagacgtttgtttctgcagcatgagacacggagaccagaactgttgtctgggtcttagtactactctttttaaatgatttgattttttttttttattatagtagtaaaacacattctttgtaaaaatttaacaatagagaatgtgagagacagacaggttccccaaactactgtcctgtgcctgagacaacttcacttcgcagatccatgttagttcttcgaatttttttcatcaattcatatatcaagtaacttttaaatatagaggtatctattttaagagcagatggtatgtttgggctaattgaattggctccgtcaagtgccattgtggtcttaactcttcccacccgctgccttttgtacccttgcccgcatcatcccaagtgcagagccaatgtccctgtcttcttttccctgaggtgacagtttcagcgtgtcattcctgggaggagtgaccaacagggcatgtactggtgtctgagtggttaggatcccactctgggggattcctgctggtggtataaccccgaccacagaagtcagggcctaagcctcagcctgccctgagatccccaccaagggggctgcggctggagggaggggcccctgggaagtatcctgcttggctgcacctggcttggcctctggagtcgacttcccaagtctcctaggaaggcgagggctctccttcgtgtggagtagacccttcgccaactggcctggcgtgtccgggaggcttcctttcttaaaatggggggatgaagcgtcagtcatgcttccaggatttatttcatcataattgtttgttttgggtttaacaatacagcagggagaagagtggcagaggaagaagagcgtcctctccaggccaggggtggggctgtggaaatgagaaaccggacgagacagagagggaatccagagagggctttgcggttgagtctgccagtctggagaaggctgctctccagacagctgagagtagggtgacacctggtgactcttgtggactgggcggagctgtgtggagcgatcgggagatccccggaggcgacctgcaggaggccagccgagtgcagcccttggggagtgtgtccttattatgcctgcagattatatccccattagcgcataattattatataatgggcgttattgcataatggcagttatataacaggtggcccagaatacagacagggggtgtaataagtgtatatcctctggctataaatagccaccagccccacaccaaatatgtggtcacaccagagccaccttataaatacccgtgctgggctataaatttctgagcagtgacgtcagcgggcatggtacctagttagggggtggtaggagggacctgcggccccacccggacacatgacatcattgtttccttagtaacaggaatgctcccgggggaccaagtgaagaaaggcctttaaagggaggaggcaaatggataggaagcttgagttgggggtgggtgctaagcctgggctgaacagggtgaggtctcctgggcagagtccttaatgggtgagacaggccatctgcccttgggtatttgacccaacgggaagcaaggcagtagactccgtttcctttcatctttagggggtctcaagtcccctttcctgtgtgtagcagattctgccagccttggctgtgtgtcagggagaagaggggagctacagagtcttccctgtccttctctctcccaggtgacctctacagggctctggggccacttgcttaagggagacccgacttctgcacccggtcatatcctccccagggcatgaccacttcccctaccagacgtagtaggccagtttcagccttagtaatctaagaaatatgtgagcaatttgatgcggatctcagagagcctcgtggaagtaatggcgctgagagatggcgcctggggaagaaagaggagacaaggatagtattctggccccagaagaaactatgaggtgggatataatctttttaggtgtatgggagattgcttcatatagggtggggaagaactagtcttcatagccctgagcatagaggaggaaatttgcctttggcagatgaggggattggaagaaggctggatgaccaactcgtcctggtttgctcagagtttcacagcccctcacctcggtaaacccctcagtctccagcaaactgggattgttggtcaccctagaacagtgattttcaaccaagggcaattttgtcccgcagggaacatttggcaatgtctgtgaacacttttggttgtcacagttgtggggggagggtgctattggaatctagtgggaagagtctactgcatatgacagtcccccaggaacaaagaatcatctcgcccccaaacgtcacaagtgcggaggtggagaaacccagccttagagggagaataagcagaccctgctgtgcgtggtctctcctcaggacgcctcttgcctctgctagcagagtgggctgcttggctgccttcctgaatttcttgcagctcttgttttctgtgctttgattggttgtgtttagggttctgtggcctggaaaccttttctaggaaatcgtgtggcttctgagagggtctttcccatctcaaagctcagagaccctttgagacagtgccatctcaaagtgagacagtgctgacagcaagccctgccaggcagtatggtattggtgtggatccttcatctgttatttaaaaaagaatggaaaaatcatcaaatacctatcccttattgcctaccaaagagtttctaaaaggcaaagcctgcctgttttccctgcctttcaggtcacctcttcccatatagacctgaacaggccactgcggctcctggggcttcctgagcgtagcagtcccagggtgagaactcacttccataaaagccagtttcccagacccagtgaccagggctggactctgccacccaaagaagcttcccaaatgaaacaaatgaggcaggagcaggagagagccaaatcctattctggcacatggagtttacagaaatctaggttctaagtgttctcatgtcatttatagaagtttccgtttagcccggcatatgtgaaatgtaatcatgaaagcatagcagacactgtttttcacctgcctttagtgcctgtttagtttactacctggctgcagttgacttggcgccctctggccttgaccacatgcatagcgtggccaactgggtcatcgtttctgctggcctcggacagggcccacagatgaaggccaggatggtggtggtggcgcagtggtctggtctgcaccagagatttggccagagagaggggatcagctgggctgtgggctacccgttgtgtgtgtcaggcccaacttttgagtttggacttgagattgaggcagctaataagcgtggatggggaggaagggcccaagggtctacatgcaaggtcctgcctgctgtgccaaaggggactctgtggggaacagtgctggctccgaacacaaaggccattgctccatggagcaataatcctcaggatattgccagcccaaaagatatggccaagagagaggcctctgccctgaggacaatggccagatttctctcacttatttatggtatcgtggtttacaaagtgggcccagcacacaaatctctgggcatagtttcaaatacatgcatttcttttaaattaaacacccccccccacacacacacatacacgtgtgtgtgtgtgtgtagggtctgttcaagccctgctgctgcccaggagtgttcccagccacgtgggacagtaactgaggatgatggtactgaagccactgtctaatattagattttgtaactcagagattcattaatataattactcagatgccagcctggcttggcaaggcctcttgaattgtgttcctcttcaacaaagtgctccggctgcagaaatgcccctggtgagcctgagctctgctaccttgcctgtgaatggggcagaaggcatgtgttggcctcctcactgcaccctgggagaggcagtgcatccccatggtggcaagtcttgcctttacatgtcttgtcacgaaaacagggaccttggagagtctgctgcagaggggagcaatctgctgggcgaggccccgtttctatgcaagttggccctgggctcagctgggggccagtttattttgctccgttgtgatacttagcatgcagtttttagtttctcttaggctggaatcttggagctgggactgtgttttatccgcctttgcatctgtctctcgcgcagcttatagttttatacgctccataaacccattttgaatattgaattaccttcagatgggaagcagcccatggcccatccttgagatgatgtaaaggctcacgatggtataaaaatcagaaagggggctgatgaaggaagagagccaagatgggaaagtggcaggtgtgctctctgagtgggcattatgaggggagaatcctgacagaggaggggcagtggaagcttccagaatgctggaaggagtgtggcaggcaagtgagaagctgtgggttaatgggttcaaagagacttggtttttcaaaatacttgtttttattttatgtgaatgagctctcaggaaaatggggaaggagcagccttcttctcagccccttccttcacccctgcccccgctgagtaccttgttacaggggctactgcttggtgggctcagcccaccccaccctctcataggccttttcttggtctccttggctgtccctgctaaatagtcatctttggggacatcctcccttttggccacaaagcacacagccccccagaggccatgtcctctccagacttggtctgcggagcagccaaactcactcgtgacagggtctcttcccgtgccagatcttccctgccacgctagcctggtggatgccctgcggcagggattggcagggatcagtcctgggcccactgggattgcttgccttttgctctgaggcttttcctcgcctccctccctctcctcaggagccctggcctccaggctccttgtatggacagactcatggctgctattcctgccctccatctcctggagaccccttcagtctgggcctctcgggtcagagatgactgccgtcctccagctggtacatgtgcttgcggctctggtagctgggtttggttattaacaatgaattattaaaggaatgtgaatagggagggaggtttgtctttcacacactcgcgcacacacacagccacttctcgaagcagatcttaaagttgattctgctgccgctgctgtacctttgcttgcctcggatcttagaactgtttccagtagtttttgagtgaattccgagcactccactttctaccttaagactctctagatagctccttcctcctctctcacctggtcctaaacctctttcctctggccccatgtgccagttcttgactttctctgagaccggttttcccctctgaagtcctccttgttcagtggaaaggtagctagaggcccaccaggcacccggtcttggtagtgtcacatgccacagcatgacagtaacatgaggacatttccctccttgctaccactctttgggctggagtccacttgagcatgaaagttcaggaggccaagcctgcctctcacaaactctggacacacaggggcttagtttcacgatcagctgattatgttgttctatgatttggggagtgtgcctggtacgtacagtccctcatctgtccactgttttaaaaaggttatttttcttattataagactactgtacattcataataaaaatacaaaattagcatgaagtcagggggtggaaattaaaattatacaattatgccactgaaataactgctattaacttttgttgcattttcccttacttattcatgcacatattttattttttactggaatttatagtatagacacttagggatgctgcttttaaaatttaatactgcagggcgcagtggctcatgcctataatcccagcactttgggaggccgaggcaggcagatcacgagatcaggagttcaagaccagcctgaccaacacggtgaaaccccgtctctactaaaaatacaaaattagccaggcatggaggcacatgcctgtaatctcagctgctcaggaggctgaggcaggagaatcacttgaacccgggaggcagaggttgcagtcagccgagatcgtgccactgcactccagcctgggcaacagagccagactccgtctcaaaaaaaaaaaaaaaaatcagtaccattgtgtattctactatgtcgctatttttcaaaatctaatttttagtggtttagcatcttttctttttcttgtttgtttgtttgtttgttagtttttgagatggagtctcgctctgtcgcccaggctggagtgcagtggcgcaatctcaggtcgctgcaagttccgcctcccagattcacgccattctgctgcctcagcctcccgagtagctgggactacaggcgcctgccaccacacctggctaatttttttttttttttgtatttttagtagagacagggtttcaccatgttagccaggatggtcttgatctcctgacctcgtgatccgcctgccttggcctcccaaagtgctgggattacaggcatgagccactgcgcctggccttagcatcttttcttgttagctgcattacccctaaattgtcaacttttctaatgacttctgtcccctattcccttttgaaaatgagaaattacctcttattataagtgtaataggtgcttactgaaaaataaaaacatgcttttacatgcttttttttttttttttttttggagacagagtcgctgtcacccaagctggagtgcagtggcactatctcagctcactgcaacctctacctccagggttcaagcaattctcatgcctcagcttcaggagaagctgggtttacaggtgtgcgccaccacacctggctatttttttgtgtgtttttagtagagacgggatttcgccatgttggccagcctggtcttgaactcctggctgcaagtgatctttccgcctcagccttccaagtgctgatattacaggagtgagccaccatgcctggcctgaaaaagaaaaacatgcttttaaacagcttcatgagatttcatcatgccagagctgatgtaaaccccacccccacccccactgaggcctttgagttgtgttgcgttcatccccattgtaaattctgctgggatggacatcctattacaccaagctttgtagctgtatttgttaccttcagctaatgcttcctagcagttgaattactaggcaaaaggtatggactctcttgaaggctcttcgtccatcctgttaaattgccatctggaaacttgacaccctcaggcagcacgcaaggatccatctcactctgtccctgtaccctgatcctattccccagagcctcagaaagatgttgccatcattgtacatatcgtgtacattgcacatacatgtcatgtcaggatgcacttttacaagtcaagtctcccatccctgtcataggtgtatgtcccgttcctgtatttattctctgcatcagctcacacattccttgatggacacatggtgttacccagtgtaaaagctaatcatggacatcagcccacattctcacaccctccaatccatgtttttatgaatctgaggtgcccccttccaggcctctgcagccacttcctgttagcactgctagaaggggagggacccttgggggtcaccgtggcatggcagtttcctctcagcttctggccttgggactgcagaagtggctcttgagactgtctggtggtgagcaggtgctggccatggtatcttaatggcagcagcccccaggtccacttctgaggtgcaagcccatgctggccgccagcacgtgccagagagctcctgaggaagcagctgctgctgacacctgaggccagctgcgcagtctgccacaaggcccctggggctgccaaggtcgcacatgtcctcccaggacttgaagggggaccaggggagggtgagctgttgctgtggactgtggactttgacatcactcatagacaccccctctctcacccttgcatcccagacagtgtcccccagggccatgcaggcagggacacacagcccccttgtgccctgccccaagtccctgtgtgtaagtgagcatgctctcatcagacttggtccccactgccatggcactcttatctgtgtgcctgaatatgcatgcttattcatctcgaaaactgggccgtagggccaggtgtggtggctcatacctgtaattctagcactttgggaggccgatgtgggaggatcatttgagcccaggagttcgagcctgggccacgtagcaagacccccatctctataaaataaaatttaaaaaaaaagaaaaaagagaaaatcgggccttatatcattttctacatcctattcggcccatggaagcgtaagtgtcttcagcctctgttgacccttgtcccccaccctttctctgtgatactccaccttacccagaacctgactgtcctcaggccctgggtagtgggagctgcctcaagactcctgaggccccacaagaggcttttgaattgcagcagtggatgtgggtagttgtgtaggacagagggaggcgacagcatcgtttctcccctttcttccttcagctggggctgtggcatggcagtgtgggccatccagtgtctagagggcttgtggccacgcagtcgtgggtgggatgcatatgttcatgaggtttgctctgttctttcctctgcagggtgttcaggatgtgctaacctgcgggtgtctgtgtgggtgtctgagtgtcaggaggtgggtgtctgtgtacaagtatgggttggggtgtgtgtgtataaatgtcagcttaattcacaccccaacaacgtaagaggaaacttctcagtcatgaggttcaagttcttgttactcctatgagctgtagtaggagtgcagtgagtagggggcacagcaggtatgtaacccctgggcccaactccaacctggcccctgtggcttgtagcttctgagtcagagggcgtgcatgcttgtgagaagtgtcaggcctttcccgttcgctcagcagctgagcagttcctttctggggttctttgtgaacctgcctcgctattaatctacctgttagtaaaagagattacaattgtcgtaattacagggcgctgcgtctccaccgtcaggactgagctgagtgagaggcaagggatgggaggaacccagccccacaggaagctgctattaaaagccctctgtttggatatggcacaaagacaacaacccttcccgggggctaaggagatctgggacaagaggcaggtcaggttccgggggtgaggagtgggctaaggtcccactgcaggctgtgggatgacacgggatgactgcagtactgaggatggtgagaacagcggtggcccgccggcagctcagatacctgggagcagcacagggctcagcaccctgaccacatgggctccatgctgaaggctgctttacttctggacaggccttcacctgcatagaatggaagagacctggtggcacttgtcatggtgagacagtggctctcttctgagggagctccacagccaccatggatttaggtggacaaacagtggtatcctggtctgtggctagcatgggccccagagctgtgtgtgatgcatgtgttcctgatagcacaggggttctcagtgagggtggttctgcccctagggtatatttggtagtggctgaaaacagttttggttgtcactacttgggatggggttgctactggcatctcgtgggtggaggctgggatgctgctagctgtcctacactgcacaagacgaccccccatagaagacagtatctagccccagcatgaggggtaatgaggttgagaaaccctgactgaggccaaggaaaggaacggcagcagggcaagccaggcccaaggagggctctaagaactccctgatgctgagtctggagaccttggcccacggtgctcagcagtctgttgccagggaggtaggagagaggggcagcaggcacactgggttgacaactgcactgtgttgaccccatggcgggcatcaggggaccacaggctgtggttgcgcctgtccgttctccctcccttttctcgtaggcttcttcctcctccagtgcaagagctggatccaggattggagaatttgctcttgcccacctctccatgtcctcgttgccgactgaggcacctgggagtgaggggcttggacattcttcctcagcttgagccccatggacccctccaggtgggaggagtccagaggaagatacgcagaaataggaagggctgacactctccagcttccatcttgcaaggacacaggccccaccctggcttctccccaacacacatctggcctggtttctgctctgagaaatggagctgggtggggcagaggcctggcaagtaaacctggatggagtgtaggaagcctccttccaccattcattcctgttgaccaaaggggcatccctgcaggcactcctgcctccttttccacttttgttttcaactttgactcccactaccaaggagttctcgggaaagagggtaggcctgtgggttaggagggcaccatggagggtagtctgtggggctgggtgagatgggtgtgggaacgcagccctgtgtttaagggtatgtgtgctgcctgcttgctgtgggcagggtggcttctgatgccctcccagcccttgggccactgtgtcttgtgttttctgcagacaaagcatggagattttcagctgttgtgaattctgcgtttcacaccgagtccctaatagtggaatcgcgttgccttccccccccctcttttttttgccttgacagctccaaccttataattttaccttctttttccttgcatacactctttttcttccctttcccgttcctggggcttttgccattcatcgctggggaccccctttaggagggattgctcctgacaagaggggaggggcttcctgtcaaacattgggagttgatgttttgtttggtaaaatgtctgtaaataggctgtgaggcagtcgttctacatggatccctgtgtatgccagcgtctttttgtgtctgagcatgtctccaagcatgtgaatgtcaggagcagagagaaagggaagggaagaagaagggaggagagagaagagggatggtgtttgggggcattgggatggctctcttccttcttggtctaaatcacagagcctgatcaggagagggtcagagttccagactcttgaagagtcaggaagaacatcagaagtgaagctactgccatctgaggtggccctgggttggctattcacagagggctggaatgggatgatggggctgtactccccactaaggctgccagatctggaacttgaccttgaagtctagttatccaggactcttaaggctctgagggtaggttgtaatggagactgtttctcctgcccagcatcaacgatgagccttggattcttgggatcaatatcagtcttccaccgtgaatgggaaacccatttctccctggagacaggttcctctgcaagaccactcccttattcttttttctttctttctttctttttttttttaaagtaggacgccttgttgctttagatggactcctttgttaagcttcaggtagcttacctatcctatgatttgatttacagcaaactcactaaaaacattggtcagtttgatttcaaaaacgtggccacatccattttcccgccatcagctttccagaccacagaatgctctgcttttgagctgctcctcagctgacaccctccttgaatccattttgagttgctcttccctggccccattagaaaatgtcggctctgactacaccatgcttgcgaacaaaggtgcagaacaattttggctgcttcgtccaggaaataaattcctcttcggtgccagaaaccattgagtggtgccatgtgttgagctctaggccccagaactgtgggcagggttattgctcagggtgaggagtgtggaagcataggataaggaggccatggggaggagacccttgcttcccggacatccccacgtactttgggtcaagaacctgaggacttgccatgtcccctgctctctctctcctggctttccatctgcagttgcccatggtatggctggtctgtggacttggggaagacaggcccctctctttgtcccatggtggcagcattccggcccggttaattgcatgccacccttcccaggtcctcttgttccgtctgctcgatgaaggtaaaggctgatttccctgggatctgcccatgctctgcttctcgacctgtgttttcacctgtaatcagcaatgccacttatcagtgtctctgaaccctatctcatttaagcccatgacagtccagtgaactcggcacttttataatccttgtgttatgcctagaagctggcagacggaagaatcttgctcaaggccacccactagcgagcagcagccctggggcctgtccccaccctgcacatctgcccctcactgctgaccaccctggcttatctcagggtctgatttctccttgtgaactctaaactcttctttccagctaccaggcagatgccttgtggacagcttgcccccgtatccacaaggtacctcccagtactcctggctgccctctgctccctgctccattccttgtcttggctgtgggcatcaccacctagccaagcacttgagccctcacaaccagactaaccacaggccggtgaaagggctgaagcctccctgccttttcaccaggctgagttttcagaactcagtgtcttctcctctctgttgtattttttttttttaattccccatctccccaggttggatttgtcttttattaagatataattcacataataaaattcactattttaaagtgtacaaggccaggcatggtggctcatgcctgtaatcccagcgttttgggaagccgaggcaggaggattgcttgaggctaggagttcaagaccagcctgggcaacacagggagacctcatctctgcaaaaaataaaaaataaaaaaattagcagtacttggatttgtattttattaagatttaaatcacataataaaattcagtattttaaagtgtacagggccaggcatggtggctcatgcctataatcccaacattttgggaggccaaggcaggcagatcacttgaagtcaggagttcgagaccagcctggccagcatggtgaaaccctgtctttactaaaaatacaaaaaaaacattagccaagtgtggtgatgcagcctgtaatcccagctactcgggaggctgaggcaggagaatcacttgagctcaggaggcagaggttgcagtgagacaagatcgcgtcactgtaccccagcctgggcgacagagcaagactctgtctaaaaaaaaacaaaacaaaacaaaaattagccatgcacggtggtggcgtgcatttgtaatcctagctacttgggaggctgaggcaggaggattgcttgaacccaagaatttaaggttgcagcaagcgatgatcacactactgcactccagcctgggcaggcaacagagtaagactgcctctaaaaaaaataaaaaataaaaaaataaactaaaaattaagcataggattcagtgccatttagtaccttcacaatgttgtgtaaccatcaccaccatctaattccagaacaattccattgctcccaaaagaaactccatacctattagttgttagtcccaattcctcattcctcctaggccctggcaaccgctaatctgctttgtttctatggatttgcctagttgtggatgtttcatataaatgagatcatacactatgtggtcttcatgtcgggcttctttcacggagcataatgttttcaaggttcctatatgttgtagcagcaagtgtcagtggttccttttttttttttttttgagacagagtcttactctgtcgcccaggctggagtgcagtggcgcgatctctgctcactgcaacctctgcctcctgggttcaagcgattcttctgcctcggcctcctaagtagctgggactacaggcgcccgccaccatgcccagctaatttttgtgtttttagtagagacagggtttcaccatattggccaggctggtctcgaactcctgatctcgtgatccgctcacctcggcctcccaaagtgttgggattacaggcgagagccactgcacccggccagttcctttttaaggccaaataatatttaattgtatggctgtgccacattttgtttatccattcatacattgatggatatttgggctctttccactttgtggtgtgagtaatgttgcagtaaacatgcatgtacaagcatttatgtggatgtatgttttggattctctagggtatatacttaggaattgccctgtcctagagtttcataactgcattccttgtgcatcttgtctgcccagcagtgctgtccccttagtgggcacccagggtctctctgggttgggcccctgctgacccttccatcactgcatttctttacttctcctatactgcatattccagcatttggagctctctatagcccctgagtgtgctgtgctattcctgcctttgggcctctgctcatgtgtatctggcatggtcccttccccttttgtctgacggcctctatctttttacccccggcctggctgtcacctccttggtgcagccttgtcccgcatcacttctcatcctctgaggccagtccctccctctgagggggcctccattttgtccattacacaccagctttcagctgcaggggggtgttacccaggcagcttctctggctctgtatctgtgtggttcctggcgtctagcaggtgccaacaaacacatgtggaattaactttaaggcactgcatgtgcttttccaagtgtgcatgtcacagatctgtgtgtgacccacacagatttgtatgtctgcccctgcagacatacaaatgaatatagaatcaaggtgtacctcccattactctctggacccctgggtgtcggtggcctcatatttgcttctctgtgacccagacaggacttggagagctctagagtgattctgaggaaacccagtcccctttaacccaaacaggtgacctaactgttccagactactggggaagctctggtcacaggggacatgcgacctgtcttttggctctttcccttcactcctctaagcatgtggctgagtagcctgcagacagatggcctgtcccttccgtccttccagaccagcccccttggagatggccctgggcagggagaaggcaggccccaaagcagcctccaggtcccgggagaaaagcatagttgctaccctggtgttgttggtaatgacttggcagtggagggaggagggtgcatacctccaggaggatagtagcaggggagccacggagtagctgccccatggcttgggtactgtgctgcagatctcatcgctgaaggtgtggctaaggctgtcccaccaggtgtttgggatgctgtctggcccctataccagccccactcagggccagagggctctaaatgagtcactcagctctggctttgccaggtggcccagggtagggggatgcctcaggtgggcacatcacggtgctgccaaagactcaaggaggaagaggggtgtgtctggccactacccagagctcactcagggtactagggatggaagggaagaggaggggaatgctgtctgacctgacagcattgcacaagtcagccgtcctgcaaggtggctctttgctgcttttcttctcgctggttctcccctgtccttctctagctgggattccagctctagtcagccagtgacatctcccccgtacccaggccagtgagccagatttttttccaagcctcaagtcaggcaggttcggggaggagacagcctctcaggcgagtgagctctagaggcccttcctcggagaagcccagccctcctcctcctcccttcttggccctctcctctccctgggcctcttccccacgtggctcattacaactccagttgttcaggtcttgacctcaagagccttccctattgacccctgaccagcgatactaatctgtgtcaacaggccccaggggttaaagaaacacaacccgccgctgccgccttagcaggtgcctggagggggcggggcggctcccgggagcagccgggcggctgcgggaaggcacttcttaggcgccgcctcctcctcacagcgcccgccttctccgctccggcttcatgctctccaggtttctccacttcctttgcagacctccctcctgccgattacccactcctctgtgccccatttcccttctgtctttcctttgctgtccactctgcttgcaggatttgggaccaaacgccctcaggcatccaggtggtgcccgggttgatatgcagctgcctgcccttgcacctctgggggcttgttaaaatgcagatcctggggcttgtccaagtgggtaggtctgggcagggctcgtgaatctgcatttccacctagtacccaggtgctgttggtcctccaggctttccccctgcctctgccagctgctgcctctctgagatgtgctcttttgtctccaggaatggagccatccttaggagacagaggcacactgctggccatctaggctgggggtagagcccagatgggagcccacctggatggcacgaaccacctgagtgatccccctgttctcagaacacaggtgggtcacctgaggatgtcctggtgacgatgcaggagctgccaggcaggaccaccatgagtcactgggggtcatgccagtgagcttcctgcgctgctggccctggctctgctgagggccatgtcagggtgaagggggcacactcctggcttagataagacaatccagattctctcagagaaacagtcacatgtcagacatgtgccctttcttgggctgaacctagagttgttcatagcctggccttaaccctgccgattccatatactgtgctcatctcgacccagttgaggctgtgcttctgtgcttcttggaacggctcggctccagggccgtgaggttggcaccccctgcacccgtccacacacacagaccagaggagtgaggatgatgaggacagggacattaatcacagttctgttctgcctggcactgcagcccaagtccccaggagtctgtgtcttcccatgttcccttcgtcctgttcacagggaggtggaaatccagacagaaacctgccttctcctccatccccacttgaagctgctggtactgcctctggccatccagccttaagacgtcccttccttccgtgtggccccacagccacaggctgcccctcctgcacagtgcacacatgtctggcaggagatggcccagagaaggtgctaagcagaatgcggggtagggcttcatcagggcctggtgtgctgggtggtttgacagtgttttgtgggggtctttcctgtagctccaggaaacctagatgggggtcaggctggctgagggagcacccttgggtgctgccctttttccgagtgctctgcttctctttgactttactctctatcccctagtcaccccaacccactccttttccttcttcctcttggctgtagctccctcacagggctggggagcaatagacaaactctccaaaaatattttttttaagtttcccaaacttttccagatgccaagaaggggccagggaaactgcaactgcagaggggggaaggggagaggaaatgttccaaggccttccctcccttccgcctggaggcgaggataactatgggagcagggtgactctggtgccctcagacagtccacctggaagggagaaaggcccctaaccatcccacccttgctaccctccagcccatcctccatcctcattcccaaagcccccagcagcatgtagaggtagaggcagagaaggatgtcagtggggcacctaggaacttctggggttcagaagggtggatttgggacatatacccccaccagttgagggaggtcaggagctgagaagtaggagaatctgtccccaagggctccctccctgggagtctggggcctgatagaagaacctgccactgctggggttgaggtgtgggggaacagacaggagggggtggtgtgtgaggacagtacagggatcactgccctcccccagtcccaccctcaaggggtgctgcccccacctctaccattctgtccatccactccctggacacctcctaaaacaaaggcctctttgtggtcctggcctactggcctgcggccagcggcattctttgcgtgtttcctgagcacggatcccagcttcgtggtcagctcctcccccacccagcctgcttcccggcctgactcctggtagctcagagcagtcccctctcctgtcctgcccagggtcctcccccagttcccgtctctaccgtggacagatctggacagagaagggaaactcccaggagcttggccactgggccttcggtgggggttgggggacaagtggaggttcaactccatcccagctccagctgactttggtgggtttcgccgagcctctgttgatatgttctcatctgtaaagatggggaaaataaccaccccttggggctatcaggcagattcaatgtctccaaaacacagagctcctgcttgccgcagagtggaagaggcagtgtgtaactcgagctccccatttctgcactgctccctgggttcctagggggctggaggtgggcttggtgggcggctgaggagctcagaggagtctccagagtcttgggtgggacgtttccctgcactcctgtgggtgccccaaacctatggcccactcctgggagtgctgaggccagtaccccagggagtcctactccaagagtcggagctgggtccgtagcaagtggcctgcctgtcctaggcctggtcttgctctgtgtgcccccagcccctcctggcatccatgtcactctgtaacagcagtggggtgtcctccctgggttaggcatacagggtggttggtgcctagagccctgaaaatagcagacctgaggagggcgggggtagggggaccaaggagggatggcccagcttttggagaacactttcgaatgtcagcagatgcacacccttcagtcaccagccacagtcacacacagagacacacacagtcctaatgaagtcctagatcactgctttggggggttttccccccctcttgttaaaaaatgttcataatttggaaagaaaaggagctttttacaagctggcggctctagagaactttccgtcggttctttctggcctcgtgatgggtggggcccacttttcccttccttctctctctcccccgctctcctaataatcccccctttccagcctcaccaaacacacacaccctttaggagacctcccgccggctgtcaccccaagaaagctggaggaaagccgaggacctgtctgtgccctcctgggccccatccaagcgccaggcacaaccctccccccctccccactcctccctcccacttagaggttggcccccacaggcctagagtcttcagattgctaagcttcccagaatctgtgcctggacccaggcccagcagcctgcctgcccttccccgagggcctgccccactctcccgcagggtgagggtcccccgagtccttcttgcatccgggggccccgccagggagggcagtgctgagctcaccgcctcggcatctgccctccccctgcctctggtgcgagggccggccgcactcccgccagtgccttgctccctaatagctttttaagtccaaccacatgtgtctgtggagtgaggagccgcccctcacggggcctcggctctcctcctccctcagccaagaccaccctccacttggagcagcctcagggctgggggaggggggggtctgcctcctgagagcccatctgctcgccccgggcctagctgaggaagaagggggcgggggtctcttttgggagtgtcgcgtgaggccagccctcaggctcggctggccccaggttccccagcctctcctctgggtcctgcagtctaggatcctctctctctgtagggcaggccaggagggactggcttctgggtgtgggagcctgggtgaggagtcctcatctcacctcgcgcctccctggccagggactttggccagcaaatctctccttgcacccagccccacggaggtgaccccccagtcgcccctcaactcaatatacgtgtggttccctgtgcgtgtgagtggtctgtggggaggcctgtggggtgcggtttcgcaggaggggagtgagggctgaaaagcaacgagctagcaggcttggggtcctaatgagaaaattgcttccagccagggagccctgctctgcggctgaaattgcatccagccccagccaactttgctgccgcagtacccgcccttcggaaggagttggggaagcaggcgggcagggggaggagcgggctttgcacatgactcaggcccccccaccgccccgttctatatgaacacaccttgaagagtctcttctgcctcacggggaggagcttgagggtcaggcttggctctggacccgaccgtttgatccttgggaggcagaggagggagtggggagggatttcctttctgttttgctcagttctgctgcacttatgaggtgctcactgtgtgcagagggcttggagaggtgagcttgcataggctgggcccacatagggtgggcccacccacccggtggtattcactcttactgttaaagggtgttaggagcactttgttttcacaaagatcctgcgtggagtcccgccttctaggatgcttcatttgaaattcggcctccctggagtggggtgggaccctcttgcctgtccttccactcgggagcccagtgcctacacccgaggccagggaacccaggggtgaaaacctggcttagctacattcttctttctgttcctcacttacttggaccattgagcagaatcagctgcagaatttgtggggcccagtgcaaaatgcaaactcagggcaccttgttcaaaaattaagaatttcaagacagcaacagtggaagtcaaggttatgaagccagccctgcttccaaggaaagctggtaccacccagcagcccactggttcaggggctgtggcctttgccctgatctgaaacaggaggttccacctgcttgtttcctggatcctggggaatctcttcccaacctgggacggtggtctccctgctgctgcatccctcagagactctaactttctggattttagagatgttgcttagggaggagggctatgaggggagggaacagaatgagaatggatcacaccttcagtgcttagagagtctcagggcaaggccgcacttgtcacccttaggtgaacctgacagtggaaccatatccctggtgaggtggaacctgcagcctgctgggcccagccagtagcgggtcagtgggaccttcccctcctcgggtggagcctcccccaccaatgacaagttctgacggctgtgcctgtgcagagcggggagcgagcaggagtgcttggagggagggaagcaggcaggaggaaggaaacaaccccattgtcatcccccaaattactggctgggatggcaggggaggaggcggaaagccgacattgtttacttaattaaaagtaaacaacaatttgccgctgccagcctcccattagctgtgtgcgaggagccctacgagctgcagactcggctttcgctcccaccaagccggctcctgatgccacacccccagcctcggctccccagggccccgggccctcccctgctcatgtcctcctcaggctgaggagaggggaacaagctattaaaagtaaataaatacataaaaagaaaacccactagtgtctcagagtcctgtgggtcaggataagaatgtcagaaactgtcatgtggcaggccagcatggggcctagagacccctgagtgtgtacactgaggtctggttgtggtgggctgggcagggcagggggcacttctttgtccagtaagccagatgttggactacctggggaaggcagcccctcccttcctccctccctccccgcaaccgaggccctagtctatactacctggaagcctgggcctctctgccccaactcccactttttccttttcccttttagcagcttataaacatccttctcccatctttttggctctgctcccagaagggggctgttcagggatcctggagggctggggagagaggcaagctccttggggcctgaggggagaaagacagctggaactggccccacccccaggacagtacagctacaagtgaccctaggaacaggggagggggttgccctaagttggggtgaggtggggaccctcccagctcctgcttctctggagccttcaagcaggaggggtggttggatggcaagaggggttttgcatgggcttccaccaggctccaggggctaagcaggacacctttccagggatctgtcctcaggaaagccctcacctctcctgtaggccctgcctgcaattatgtagagcacaggcttccatctggacctcggtaggcatgacctgaggcccatgactttaaaagctcaggatgtgcgctgggcgcaggagctcacatccgtaatcaatgccagcactaggaggcccagaccagagggtcgcttgagcccaggggttcgagaccagcctgggcaacatagggagaacttgcctcttctaatagttaaaaaggggtggtagcatgcacctgtggtcccagctacttgggaggctaagtagctgggaccacagctgcatgctaccacccccagctaattttttaggagagctaggagggtccttaagcccaggagtttgaggctgcagtgagctatgatggcaccactgcattccagcctgggtgacagagcaagaccctgtctcaaaaaaagcaaaaaagaaacagaaaagaaaaaaagctcagggcccggatactgcagggagagaagtacaggagcacatgaaacgtacccagctttatgaaaccattgctgagcctccttctgggggccagacaggcaaggtggggaggggtaggtctgagaaaagagctagactgagtgaatgaaacagccccaatccccagggtgtgggggttgagaaccctggtctggagttggtccctccaggaagatgtaggtccccactcttccccggagccaccgtctcacctttctcttgtcccatcccccatcctcatttgcctcctctcatcttagtcctccaccattaggattcacacatccacatgcacgtgcacacaagcgcatagatcccgggattcgtgcacatcgggattttcacatgcactcacacacatagacaaatctgggaagtctgtcccatacttaattgaattaaaggactggggtttggcaggacattgtgtatctgagctgcagcctcttgcagccgtttcaagggctgatggttcagtctccctgtaattccagccgctgctgctccctgtgggcaggtggctgggtctgcgcctgtcgcctctccccttccccttctctctccttttacttcctaggccagagccccccagcacagggcctggggaggctggggacacccagtgtattcctcctcccttctcccacttgcattctgggagctagtgggaggttagggcctcctgaggaggaggtacccccagcgtgaggccaggggactgtcagaatagaacagtccaggcaaatccctccttccaggttttctgctgcccattcttggagtgggagctggaggctgcttgccactggttggaaagtggacacacttcttggccaagtgtaagccacctggctttaaaaggtggagagtctggtctaaggactttggggaaccctactggagtggccaggagccataatgattgggggagtggtgccagcagatggggtgtgctgcagggcaagagggatgctttttttttttttttctaatttgatttaattagaattcttttttttttttttttttttttttgagacggagtctcactctgtatcccaagctggagtgcagtggtgcgatctcggctcactgcagcctttgcctctggggctcaagcgattctcttgcctcagcctcccaagtagctgggactagaggcatgtgccaccacacccggttaattttttttgtatttttagtagagacggggtttcaccattgttgccctgggtggtctcgaactcctgagctcaggcgatccactcgcctcagcctctcaaagtgctgagattacaggcatgagccaccgcacccggccaagaggaacgcttttggcctccatttcttccctccacttcagcctctgctttggcaggctctggggtgggagtaagcctgttctcagctcccctttactagggacaggtaattccactctggctgctccttggagaacagagtggatgaactcagtccccacctctcagagggacctagtacagagcccagcccccactctgaggaagccttggatgggccattcctggcccagagcctgaggccattggaaagggcctatatctggaacgggtgaaggagagagcccgggagcctcactgtgggtgggaggggcgtggtcagccagccttgcctcctggggcatcagctcccagcttgtgctgcaccctctgaccacaactttgtggggcgcctgctgtgtgcagaatctaccccgaaacctatagcttaggagaagcctgggtaagctgctaatggctggtagtatgggtgtccaaggacctgttggaggagcccagtccagccctacatgtgtgacccttggtgcctggcaaggcgggggggtagggagcagccctcgcacagccagctagactgttttgctctggggcctgaggattgcggggccagggaagcaaccaggcccagtctggggccctgtgaagcgatctgcactgcccagggtcagggggatgggggggtcggcctcacctcggctaacctcccagcggaacaaaggggcctttctccacgcccgcccgggagggtgtgcccgcccggctgctgccgccactgcagagggcgctgattttttttttcttcctgacttttctccatttctgtctctggttcctgatctctgacttttattctccattttttcactttttatggggatggggtagagatcttccttttcaagtgtttaccaattgcagagacaagtctgcactgccaaaaggtgagggcatcctgggtgcgttaggaatactccgggagtcacgtggccttagacccccccctcccccccaaatcgagggcagctccgttctgaaagaagcaggcaggattcagagcggcagccacacagggtgggaccgggctcactggataacccccagtcaagctatgcacctggcaggtcccccgccttctattcgcccacccatttcgcagtcccctttccatccggcccatgcaccgcaagctgttcctaatcaatgcgaacgggaaactcggccctcatatcacgggatgtgtttggcagcgacagcaacaggagccgctgccacgggcagctccttccttggtgcataaaccagggtcccagtggcctgggcctgagtgggttcttctccttcctcttgggaccccctgggtatgcagagggaaccacatcccctggagctctgggccggtcgctggccgcgccccgccgcagccctcggagggcagctagtgttaactcgctgcgccacctagctatggcgtccaggagtgcagcgcttcgctccctgaaccgcgtcgcttcctgagccgcgccgctccctgagccgtgctgctcggcagcctggggaaaacctctttttggtccttcagggagctatgaatgaggaatttggcagctgtcagtcggaggatcagtgtcactttgttccttcagcagcctttgctgtccttatgcaagcttggtactttatagtatataaaactcaaagttaaaatatgttaaaaaaaaatctgtaaaaatccccactcacatctcatgttgctgagcaggtcttggttgtgttgcaccaagaagcaggagagacacactggaggtctaacagcagcaagtctaggatttggagcctaggcttctgattccaggcccagggctctatgcagcactcggtgccgtcctattcaacccatccctgcccaggctcttagggctccaagctggaaatttgcagtcaaaggcccagattcctcgtatttcctctggacagctctggacagtggctgccttcgggtctccagggcaaggagaagagcaggcctgcgagagagtgctctgccttcccctgctgtgctgttctcagtgaggctccagttccttcctctggtcattccagcccttgagtatggtgcaagtatgttcagtcctgtgtctggaaccagctcggctttgcaggaagattagcagcatcagggtttccacattaattcactggacatgagtgtcggtggttgggctgcaagaaagctattctttcttcaggagggggaagatgtcagctagctggtgcctctgttccctgggtggtcagtgtagccatggtttgaagaaggatctagaagggtctctttggagtcttatcatccactgcagctgtgctttgagatgtgggggatgtagcagcaaacaaaaccaacagagagggcttgtcctcaaggggctgatggtctagtggggtgttcctggtcaggacctcctggcctgagtggcctggtggccaggtctctggggctctcatgccttccagagctagagcctcccacttccccagccatggaccagccagaggttccctgtgtaggtgggatttggaggaaaggctgtttagtttccagcctccaggtgggagaagggccccacttaaacatctgattatggtgggcatttgtgtttgttgcttgtccatgagcccagggtcagtccctgctccaccaaggcaagtctctgggtgaaggaggcccctttggagtcaccagcctgggtactgagtgctctctcacaggggtattgagtgctctctcacaggggttgaggaagttagcacctgaggaggggaggcaggtggcttcagcctaactcccacttccccttccccacagggtgaattgaagtcggtgggttctacagttctaatcccaggccctgaggtttcctggatggattcttccaaggaaagggaacagtggagggaggcaggagcagaaccctgcttaaggccagaaagagagcagggggcagagagaggtggtgggggaggctgatgctccccaatccctgccgaccctctgtcctttttgatttcctcaggcaaataggcagagagcttagggaccttcccctgccctgggctaaagtgaatttcctgctctatagggtctcacttcttccaccttccttttcttagccagttgttccttctctgagccttctccttttccttttcttcttccttccctcccttccccagaagcattcaggggtgggtgagtaggggctccttgtcctggggtctccccagttcctcactctgctgagtgcccaccagacagatgctggcagctgcatgcagcccagcagttgtgcacacaaagccactcttgagtatctttaggaaagttttcctctttctgtttttttttttcttcgcccaaaggaataatttcctctctgctcttttttgtttttgtcccctttccctgcctctctcagaatcttgtactgtactgctctgattcttcttgccccagtcttctttctttgctttggccctgattctctactgtggctcctcctctctctccctttctctctatcttttagttttagttttgtcttttggttgctctctggctctggggcttcctgccttctcgcatccctcctccaaactcctgcttgtcccaggcgcatcccttgagtggcctgcagagcctccgcctcctgtttctcataccaggttggcattagagtctggaggactctgtccctttatgaataattagaccaagggcaagtgtatttgggggtaggaggagggtgatgcccagccctgggaggttgggacactattaatagccctaagagcagctgggggtgagggtgattgtctggccagcctgtcctgtcctgggcagctcaaagggccagaaagggcagtgctggaaatagagaaagcgggtgggggtggaagagcagctctgcaggccccttgctgggatgggaccccccccctccccagggcccctctcttttcttgacatgtggggtatggagggcattctccactgtcagtttttcttcgtcaagttggggaggggatagaagcttcaggggctgggggccgcttgcctggaccccaccatcacatgactcttggccccaggccctctcagaaatgctggctccagctgccggctgaatcgtggcaccagccagcactgccaggagaggcgcctggcctggacgcccatgggcctgtgcctgtgctcctggttttctcagctctctgtattccaaggctgggctgggctgggcaggccttgggcctagcactcccagagtctagggggacaagctctatcctcccttttccctgttggccctctctcccccacccctgtttctagtatggtgactgtcttgagaccgttggatggctattgcacaccgatgtggggagggatatgcctgtacaggtgtctgcccaggctctgccattatatttgcagagaaacctctctgttgctctttgtagatggtagtgggccaggccccaagggagcccctctgttcactggcagtggtccctgggtcaagacaccaaaaactgcaatctaggacacactcaccatgtactcaagagcgtgagctcctggggaggggagctgagggtcagccacagcttcccccaccagggtgggaggtggcatttgaacagagttgagaaggaggaataagcattcagcaaatggagatgaagggaaatagtaatccaggtggaaggacaggcgacatttatgtagccccaactatgagccaggccctgagctaagcaccttattatacatgttttctcatttattccttacccaggaatgctaatggtaggtgttatctcccttttacagatgaggaaacagttcataacttgaccaaagtcacaggctggtaggttctggagcacggatgtgaattgggggagccttggtatgccgttgctggccacccacctccttcctcctcctaccctccatttcagcatgcccccttcggcccctctgtgctggggcaaggccagctcacccaggatagggtatccacagtggtagagcactgtgttgtaccccctcagtggacacaggctccagaccaagggcacctccctgggtaggccaagggcaggctcagaggacaggggaagcagacccaggccaatggctcctgcccaagatgtttttctttgccttcttccttgcctgatctttgcctgtcatcttcaatctcttctgctctgatgggaattcctaccccaggtatctctgaaacaccccagacagtgctgctgccatgccctgggtccacttgttccctccatagtcaggtatctgaggtgctaggtttggtgctgggtcaccttgccatgggcagacacaggaggagcctgcaggcccactcgcatgtcccattgctgctgtggctgggggtctcatttattaactgttgggctgatcctggagtggccattggcaggtgggcctttgtccacctgctgggtgctctgttgtgcaccaggggcatatcccttctctctctcctttgctggccactgcctgtcatcccttggggaagagcaactgagcattcagttccccagtgcctcctggcttcttctgccgctccatgcctgggcccatctaaaggagttctccctgggctggggacggctgctaatgaacgggagccaagcagagaacgctgagtagctcacaccagaagaactccctggagggctccggggccacttgctggggatggaagggaggtgggagttctattgttttcctggaggaaaattttaagcttaggaacacctttctcattatatgagggaggcagtgatgggctgtgtggctggaaggcttctggctatgagtctatctccacatggggagtggaggcaaccaaggactgtaggagacaggccttcttcacctcgacaccgtgtggggcctgaggctttcagatgaagtgtgagactgctctgctggtctcctgggtacaagatgagctgatggacttgctttctcctcgcttcccgaagccttactgccgagctgtgagtcctgtagtagccaggcctggcacttgctccaggggcacccgtagaggccgggatgtgttggaatggagaaagtagttcttcctggggtcaggggatggagaggggaatgtcccatccagatgctggcccttcatctgccaggttcctgtgccttccctacccccccgcccccaacaatggcttttcttgagcctaggccctaggggcagccagagcaggcctagaccacatgtgggtgtcactcggtttcttcctctttcctgtcacttatcccctctgccatgtcctcttcccccatctccagcaggtcagtcaagtcaaaggcagaagcccctttggatctgtgagcagggagggaatgaggaaaggggagaggacgataatggggtgacatgttcccctgtccttatccctgcccccacccacagcttgcgggctctgcttcttgttcaggctccggctttaaaccatgtgagactctagggatgacagaggagggaaaaacctgccacctcaggatgactccaggatgtgtgtgtgcatgtgtgtgtgtgtttgtgcacatgtgtgtgtgcacatgcatggtggctggtggagcagggtgaggaatggagagaaggagaggaagatcctagaagccccgtgggcccagaccctggccaagcctcatcccccggccctctggctgccctgcattctcaaggacttccttggtcccctgagtctcctgtctgctgagacggggagaacccctctgtgacccgtccccttagccccccatctatccaccgttcccctcctcagggtgtctcagattctcagacttcagtttcaggaggcacaatagttacattctccagctctgattgctacaggcagggcctctggctccccttgagattgggtttcctgtgccctggacgctccagaatctcagaggaagcgggagagaagtaggaggcgggtgcagtgctgggagggccagtgattggccccagaatcgcatcagcccttcagaggatggggtgttgcagctgcccagaggcacccccagaacagaatgtacccccacttgcttctggaatgtcaggcctgggagggccaggggatgggcaggcacaccccaagggctgttctccccgtttccaaaggccagcggttcctgcagagttgaaggggattcctctctggtggctccagatgtaccatctcactccaccctttctggacggcaagaagtggttagtggcacctccgtgtgtgtgcgcgcgtgtgtgtgtgtgtgtgtgcgtgtgtgtgtgtgtgtgtgtgtatgtgtgtgtctgagtctgagcatatgagtgtatgcatccaagtgtatgcacatacctgggtatgcatatgtgggttcagctaaggccaaatctgtgcacacccctcagcctccataaaacttgttaggccaaagtccgtgggggcaattggccagcaaattatacatggcccctttcacagtacaagtttgtttcgagcaggagctgagggcagtgttggctgtagccagcaggaattcctccctcaccctagtgggagccataactacctccccatctgtaggtggaaaatatatatatatatattaaaaacatgcatccgggcacggtggctcacgcctgtaatcccagcactttgggaggctgagacgggcggatcaccaggtcaggagatcgagaccatcctggctaacactgtgaaaccctgtctcttctaaaaatacaaaaaattagctggtcctggtgacaggtgcctgtagttcccagtactcgggaggctgaggcaggagaatggcgtgaacccaggaggtggggcttgcagtgagccgagatcgcaccactgcactccagcctgggtgacagagcaagactccatctcaaaaaaaaaacaaaaacaaaaacaaaaaacaaaaacatgctgtcagttggagtttatgtgcaatcccaggctcctcctggctgctggagcttcccctccagagctctactgaagaggcagtgtcctcttggaaacacgcacaagcacacgtgcctgcaaacagcagaaggaagaggggggtgctgaagaggtgagggggaggcaaaggaaggacagagggaggggagccaagggagacagggaagtaagatcagaaatggggatccaaggggaaaggcagctgaataaaagaagtaaggtggggacttgttccaggggctgagaaggggagctggtgtgggtgtgagaagggcaattttgcaggagaactttgtggctgttccagaggttactgaggggcccccaaggaagagaggggcccagagtggccacttggctcagcctggctctggtctgggcactgccagaggcctccagcccacaagctgttgttgctgtggaatgaccagtggtgtgcagatgaatacagagtggccccagaacctggagccaaatcccgtttcaaaggcttcttcagcagagcccacttgggcccatgcggagggagtccagtcttattgcctgctccttcgtagccctcccttccagaagcctgcaaagtggccagaaccatgggcaggggaggcctctgcctcagagacatggatctcacgagtagcccaggtccccagagaaggacagcccgcagagctgcgtgtttgtgtgacacgagccagcctgacacccccaaacagcatcgagaatgagctgtgggctctgagatactctccctcccctagcctggcccagaaaccagggaccccgaatgccagcctggccaaggcacctgtcggacacagcggctgggctcaggttttaggcagctgcatttgatgggccaagtgggaagcagctaagagcacagaaagaactctccagcttccagcaccagcatggagggaaactctgagttggtgtggggcgaggggaagcagcagcacccactctatcccatctccaaccagtatctccagggagcgctgggagccacagtccctgaagagactgggagggtggttgggtggccctgaacttgggggtgcacagttagtgtccccactggctggcaagcaggctggaaagaagcctgaggccagaaaggcttccaggggacatggccccagaagactggggaatcagagagacagtcctcgggggtgtcggccgatgacagaggataaaagatgaaagatggagcccggcacctgcccgcgttgtgccagccaacactgtccctgcccctccactggcccataggccaccagctggcccattgtccccagtgagagagcagacactggagggggctcccttgtgggcaggggctcactcatgtacgcctgcctggcagggactgccagggcagagccaccccgggctcaggggcgaggaggaaagaagtgggggtggccaagagacagagcgtggagactgagtgggaggcccggccagagtccgggaggctgccctccaccttcagagtggagaacagagccctgctgtgctgcagtcaggtcccctcctgtggtgttggcagtgggcagtgtgcggggcctgcgaacaggagataaagaattcaggcagagtgttttttctcactaaccgtggatttgtgtatttgttcagctggtggctctgataagccccattctgccagataaaagcagagcagccacgaggcagggcctggggaggggcatcctaaaggggccttcctcctttctgtcccaaatcccagggttatcccctcccccggggaagcccagacagggaaggcagtcacgacatggagatgctctgcagctcctgtcacctgtccagagcaggtgtagacctcaaggcaaggctccccaaagagcctgccaggtaagaaagctggcccacgttgtgcctctggtgggcaggacgtctccttgcctccccaggagctgcctccccaggagccctttcaccatggacctagtggcctctctgggccctgcagccactggctggttcctgccagcctccttcctctatctatccaaggcacatccccgagctgacagggtgctcagagaccttcccccgtcacatccctggtgtcccgaggtgcctgcggccctatcggggcaggggtctactcttgctgagctagttaaggccctggctagagatggcctgtgaggactttagccacctttgagtagagctgcggtgtcccctgcccctggcttcagccttccctgctcctttcactgtgctggccagcggggagaaggagaacaccacttgagcagatcagtggggccctggctgcagctgccccggccgcaggcctggctcctgtgcctctgagcctgggtccagatttcccatgtctctgccttttgtcctggagctgagctgagcatgtcaggggccggcggtcgcggcattgtgggcctccggctgaggccgccagccgtaagatggctgccaaggtctaaaatggctgccagcagcgcccggagcagcgcccggaggcgcgtggcaggggctgcactcgcaccggatccttgctcccacttgctcctttacacagagctaatagtaataacagcaataacgttttggggctgtgtcctgatttagaaggatttcctgtctgtcgcgctctcctggagccctatttgtctctgcctcagtcgctggcccacctccatctctttgtcgggttccctctcggctgtccctgggctgggtacgcgcatgcgcatccacacgcgtgtgcacgggcacatgacttgccatctccacttggtctttcgcagtgggtaggggccgctcccatggggtggactgtgaagcttcctccttcttcccctgattccactgatccagctctggagggcttggtggggaccaagttgtccctaggatgagtggggttcatagcagagagacccctgggcagcagagtggggaccacgtgaccctcgctgagctctgcacatgggtcctgaggttgtgcccttcctgagccatgatttagagcaaccacaggactggggtctgaggaggccctggggtgggctgcctgctccgtagacctcttggctgtcactcccggactggctggggctcaaatcagacccagaaacccagcaatgggccaaggtgaaagagtgaggtagtatcaagaaagttcacattcacaccatgctatggcacagagaggctgccctctcagggaacatgggtaggcttcctccagagcagagagtgccactaacaaagagatggctcagggtgggaacctcttttgccaaacacaccaccagggctgagcgaaaggggaggtatggaaggatacaccccaaaccagaggtggtgaagtatatccttccatattaaaagcacttgttagcactttccgtattaaaaagaactactttttcttgactcgctacaatagtatttattttttggaattaaaaaatcaaaagttaagtggggatggggtggaggggaagtggagcctgaaacagtcacccttttttacccattacactaaggcaggcagcctggagcatggccagtgctttcagccccagacatggtggggccctcatgctgcaagcaggggtgccacccgggtgggctgcatcctgccctccagccccagaacccagctctgttccttgcctcccaagtgactgatggggtccctcaccccaaccctagggctgatgtcaccttttgtgaacctcctttatggtgggggccagcaggttgaatcagggtggtggcgagacccaggaggcaggaatgctctttaaagtcgggcaaagccctggccaataccaaggcacgtttttcagatgccacccccatgtggtccccctgtgagcagctgattcttcaccaaatgcctggcttcctcctgccccacaacctgcctggcccccctccaccaccctctcgccagctgtcatgcccaggcaggcattctggaggtccccgttgtgcccctggcacacaaagctttgaggaccagggggaccagggtggggggctttcccaagctcagcaaaatattcacacacacactccaccctgcccccagccctctgtgagctcccactgcacaatgagcccttgtctcggggctccctctgagcagctgtggcaccggggcatgagacagcccagacaggctggcacagagcgggcgacagcgtcagggcagacctcccccctctgggttgccaggcactgcctctgagcataaaggtgaggtgggggaggcgcaggcagacaggaatggcttcaattaaccaagttagggaaggggatgctcctctgggagctggagctgggtgggggatgggggacccttgggtctgtccccgctgtggagagagatggtctctgacttctctcttgggacccctctttgctcctgactcttggccggtgcttcttacctgagggtgactttgcccttaagggcacagtggacaatgtcttgggacagtttgggttgtcacaactggggtgctactgtcatctagtgggtggaggccagggatgctgctcagataccccacagtgcacaggatggtccccaccagagagagcaatccaggccaaatgtcagcagtgctgaggctgagaaacctgcactgggcctgtctttccttctctgctttgggtctcccggagcctcctggggctggtttggggagagggtggggtgaaggtttctgtagccagggtgggccgtccctgctcttgcaccaggctggaggggccaatgcttggctggtgcttatggggaactttgctcctgatacattctccccttttgtgtctcctgcagaatccggacaatcagatagttcaaaccagcaaggagatgcggacatcaaaccactgcccaacggtcagtgccccccacctgcccagctgcccttatccttcatgcccctccacttccttcccccaccctggctgccctggccaccctcacttcttccccttcattcagctgtcccttgactgagcttagcttgctgtcctgaggggatgggggcacacctagaggatcccccctgttcggtgtagacctgagggctagcctggagctggaaacgggacttgggagggagaagcaacagtgtggaagacctttggaaatagccaggcagcccccttctggccttgtcttgactcactcatcctttcccctcttcagggcacttaagtttccaggactgttttgtgacttccggggtctggaatgtgacggagctggtgagagtatcacagagtaagtgagtccttccttccaggccagggatggggattgaaagtgaggaggtgggacctcatgggatgtcctcctaatggggtcttagggcaggtggatgggaacagatgctttctgggacactctcggcttcactggtgctgggctgggtacaatagagtcttccagagaggcctgtctccagtctccattgctttggaggaaaaagaaaaagtcacaaccaaaggctcttctgtgacccactagctgggaggaggttcctcagcagcccagatggcccactttctcccatctcctggccccacagtaaactcaccctgggcttctgggaagctgttcatgacaaagaaacagaccccatcaggcctccccccacctccaaacctcatcaccctctcgttcttcccagctcctgttgcaacagcatcagggcccaacttctccctggcggacctggagagtcccagctactacaacatcaaccaggtgaccctggggcggcggtccatcacctcccctccttccaccaggtaagcccagtggccctgcctttccatcttctctccactccccccagggccagggccgtcccagtggctatagtcagctgtgtcactgaggctagggtgcttcagaatgtcacctctctcattgagggcactggctctaacactttagagtccaccatgcgcagtcacccactgagctgctttgtgctgtcatgaaggacccagccctggggacacaaactcgcacaaggcatcgctttgcctggaagtgggagtccaagaaggtctctgtcttggggaggtgacatttgagcccagacacagagggggttgttggggggtatggggaaaatgttccaggagaagagggtagcctgtatcccagttcagcctgcacaggctggcggggcaccctgcagagggctttggaggccagaagaaggcatttagacttcatccctgggtagtggggacccctgaggggttttaagcaggggatgctgagggtgtgtgttccagaaagctctctccagcaacagtgtgtgtgggcgggactgatagccagttaggaggccattggaaaggctagagtgggggagggcctggagggtggggtggatggagagggagggagctgcttgggaggcagggatgtgggttctggccagggcaagttgtgctgggcagggtccactccactttttttttttttttaaaacgggtgtttatattaattgcgagatttttggcattcattttgattttttaaaaatatgggactaggccaggctcggtggctcacgcctgtaatcccagcactttgggaggccgagatgggcggatcacgaggtcaggagattgagaccatcctggctaacacggtgaaaccccatctctactaaaaaatacaaaaaattagccaggcgtggtggtgggcacctgtagtcccagctacttgggaggctgaggcaggagaaaggtgtgaacccaggaggcggagcttgcagtgagctgagatcacgccactgcactccagcctgggtgacagagcgagactccatctaaaaaaaaaaaaaaaaaaaaaggaactaaaatattctttatattgatgactgagttttatggcatttttgtccccctgacatttttgtccctctgacatttttgtccctgtgagtacgtcattcacctcaccctagccctgggggctgccaggaaatcataggtgggatacaggaggcagctgagggttttgccgacttctctgatgtgggcagcttggaggaccgtggcatcacagattgggaaggggcttgaggaagaggagcaggttgaagctgatggcttgaggggccctagggctgatcttggggttgggcacgcagtgagtgcccagaaatgctgctgtcggccggcaccactccccacccagagggccatctatgcacagttctttagcctggactcttggtcactccctggagcctcagcccatccttggcccatgtgaccctttctttcttccccagcaccaccaagcgccccaagtccatcgatgacagtgagatggagagccctgttgatgacgtgttctatcccgggacaggccgttccccagcagctggcagcagccagtccagcgggtggcccaacgatgtggatgcaggtatgggtgcgggggatcctgacccagagcaagggcagcccagagtctttttgtccccttctcagttcacctggtgagcctcccaccagttgtccccctgtcggggggcattacccatctgttttcttgcctcctgatcttccagggagggcagagcaggctgaaggaagggagtggaggtgagggtgaggaggggtgctgtgagagtcagcagcagagcccgtggtatggcggtgggaagcagagggggtgccaagcctctggtgccccacagtgggatggccgcagcccctcctggtatttctctagaggttgccccaccccgtggcctcatggttgaaagcagtttctcaccctgggggctcatcattctgtgtaggggattgttctgtgcatggcaggatgtttagcagcatccctggcctccacctacaagatgccagcagcaaaacccccacccccagttttgatgaccaaaaacgcctccagacattgtcagacgttccctagtgggatggaatcctcccaggatgagaaccactggtctcaagggcccagcttcacagagagaggctcagagtctagtgaagaatgagcagagtccttttgagaccaggtagggaagctagcgaaggggagagagtacagaggaagccagctcagaccttcccagtctcctctagggatcttcttcttgttgaacccaccccccttcacctccattcttgactgagggtgcagacagacctagagaggactctggaagacagcatgtaacacgtgcgtgtgtgtgtgtgcatgtgcatgagcacatgtgtgtgaggaggctggccgcaagagtcccccgctgacgtgccagtggtacagcccgtgtttatcctcactgtgggtgtgacagggcctgggagtgcagactcacgcgtgtgggttgtgcacagggcatggctgctctggacaggcctgggccctgggcatcattctcctcctccaaaaggtgagggtctgacctaatggtactttgtctgatgttttccagatatgcccctactgggaagggccaagtgggcaggcagagtctggggtggagcgaggtggggctgggaagcactcctgcttttctgctgccccagaacgaatgcaagttctggcagcttctcctcctcctgggaggaggaaaggagggctcgcctccaggcctcaggctgagggagtgggctggagaccctctagatggccagcagaggctggcctctgtgagaaggcttccttgcgtgactctggggcccctcccaggctctcctcgtggcaggcagggacttgggccagcatgggccacatgcttccctaggggagccttgagaggcagagagaggagttgagaaggcccgggagactcttgggctacatcctgggtccctggccggggcctcagtaggtgaccccttctgcaaggactgcccctggggtgcatagaggactgtgtctgcagctggctcctggggcaagggctcctgggctcctgtgcccagacctaattcctgaggagcccccctcttcctggctcctgctctctcctttcttggctgtctgcttttgcgcctgccatttctgcatttctgctccttccggcagtcctgccacgcacggcccctcaacatcctcctgcagcaccctccggctcccttttcccctcaccccgctgtgtgttgttttcatgggctgcaacaaattgccaattaagcagcccagctgcaggacagggaacagctggggaggcactgtgcggccatggggacagctgtgcacagctggtaggatgctcccccctccccactgtgccagctatcaggtggcacacagctgctgccagataacacctccgctggcggctgggagttcgcccttcccccgccccttccctctgcagttaagatggctctttatttctctgttctgcagcccctccacccctcacccaaactgacttgatttgtcctccaagggtggcagctgtgagatctgccccaactctaccttatccttcccagcctgggcacaaccttaaagctcagcccaagatgggagctgatctttccagaagaacctggccccctgggggccctgctttgtcatttggatgctatggccactgggcagagatgaatttctaaagacagacttcaaacaaggtgttctctgtgcccttgtttcatgctgaatgccacccacacctctggcaccagaagcagggcagagccctgaaattatccatcctatggcagctgagcttctgggtcccctggctgggggagtcttctcccctctggctctgcctgcacagcccggctaggcctgagcagcccaaggactctccaggtcctctggcctctgtccctgctctctcgctgggcattgtgtccctcctgagggctcatggctgtgtgctcccttccctaaacggggccctggcttcttcccaccagaacctcccatggccccgggcaccatggcatagaccccagcctgtccctcccaaacttaccccttcccggctctcaagctggcgccctggggttcctcctgcactcctttcccaatgttggtcctgcatcccaccctttcacttcattacctgcttgccagggcataggctggggcccttgctcaccccctgcctggcacacaccaccccacattacccaggggcctcgttttcctctctggttagaagcaccccttggctggcctacacacagggcctcggaaccaggcctagaacaaggcctgggactgggcaaggagcagcaggagggagcacagtggaggaaggggcagtggggaggggctgaggagagaaggagcgagctgctggcttcccgccttccccgcacccaccccagcccagctaaacctgccctgtgttgctgcttcctccccccaggcccggcttctctaaagaagtcaggaaagctggacttctgcagtgccctctcctctcagggcagctccccgcgcatggctttcacccaccacccgctgcctgtgcttgctggagtcagaccaggtgagaaatggggggccccggaggggggcagttggggaggtggctgagtatctaggggcagctggccaggtgaaggggccagagctgaccccgagtgacagccccacgctctccaagtgggccaaggtgcagcagcgggtgggcatgggagccggcccctgcttcacgtagcacctcatcgaggaccaggccgggcccctgggctgcccacctggctcctgagcaacctcccacttctcactcctcacgtgcatgggtgctacatacaacacaagcctgtcccgagtcctccccaactctggcccagttctccttttgtcctgccagctgtgagcgggaaggcacagccttctgctctgccttcctgccggctcctctctcccagctcctggctgagcccaggctctggatttttgccagcatgagcccaggttgatgtggggcctggatggagaagagtactcctaaggagcccaggctcctgcggcaagtagctaccttgtctgggcctccctgccgctttctagaaaggaagggctgggtctaggggacaggtggtacctgggctgctccccaggaaaaggaactgcccactgccgtggggctgctctctgacttcagtgtcccagttgagaaggtgctcaggatgagaacacctagatcgccctgaggagataggatcaggcaggaggctgtgggagctgagacctcagccctgtcactccttcactttcttcttccctctctgggcacccacctggcagcaagaggcctggactttttctggatatggccctatgtccgcctgccatctcctgggctcgtatgtaggacacagaaaatgaggaggtttacctcctggcttcctccttggggcctcctggctgggagcccagaggcagccggtgctggggcagggtgtggtggccgcgaggtgggggtggggagcccaggccctctacacaggcagcaggagggcgcaggcctggctcctccggctccacctcagcttttatgaactccagagagaagccaagtttcctcagccccctaatgaaaccgagagcaagagcgagctgattggaaacagacgggaggaggaagagctggggcctgctctgggttgggaattgcgtgtgcaaggacgcgtatgtgaggacacgtgtgtgagtgatgaggctgagcacatgagaacaccgcctaggtggcggtggctgggtgcacaccagctcgcactcaggagatgtgtgtgcatatgtcagacggccatcctgagcagatgctggctttgtcttcatccagagccccagggaaccctctgcctcctcttgtcccccacccagtctcccacccagggcctgaattaaggcagggctagtgaggcactcaccttaggtgcagagtgtcagcaagtatcaaaaactcagtcatcaagataaataatattttaatggaatatgttttaaaatccaaactattgcaaaaaaaagggtatggtaagcaaacaccagtttttttgtttgtttttctttttcttttttcaaagacagtttcctgctctattactcaggctgaatgcagtggcacgattatagctcactgaagccttgaactcccagactcaagtgatccctcctgtgtgccaccctggctaatttttaaatgtttgttgtagagacggggtcttgttatgtttcccaggctgacctccaactcctggatcaagtgatcctcccaccttggcctcccaaagcactgggattacaggtatgagccacagcactcagccatgtctttgtttaaaatggtttaaaatgttgaggctgggcacagtggctcatgcttgtaatccctgtactttgggaggccaaggcaggaagactgcttgaggccaggagttcgaggctgcagcgagctgtgatcatgccactgcactacagcctggatgacagggcgagatcctgtctctatttaacagatactggctgggcgcggtgtctcacgcctgtaatcccagcactttgggaggctgaggtgggcggatcacaaggtcaggagatcgagaccattctggctaacacggtgaaaccctgtctctactaaaaatacaaaaaattagccgggcgtggtggtgggcgcctgtagtcccagctactcgggaggctgaggcaggagaatggcgtgaacccgggaggcagagcttgcagtgagctgagatcgcaccactgcactccagcctgggtgagagagcgagactcagtctcaaaaaaaaaaattctttaggctgggcacagtggctcatgcctgtaatcccagcactttgggaggccaaggcaggcagatcacttgagcccaggagtttgagattaaccaggacaatatggcaaaatctcatctctagaaaaaaaaaaaagcaaaaatctaccaggcctggtggcgtgcacctgtagtgctggttacttggggggctgaggtgggaggattgcatgagcccaggaggattgcttgccgtgatccgtgtttgtgccactgcactccagtctggatgacagagcgagaccctgtctcaaataataataataacacttttttaaaaagccaaataaaataaagacaagatcctaccctgcctcatctgcctcatcctaatctcccagcgctggttgtgatcaaactttatttacaaaaacaaatggctggcctttggaccctagtttgcctatttgattattattattattattatttttgtattgcattaaaacatcatggatcctgatgactgacttttttgtgccgccttaacttttgtgcctgtggcggctgccttacctgctcaggatcctcaggaccctctgaccggcagctcccctcctctcctgtccctcccactggctgcctccttggccctgacgcccttttttccctgcccacgtgcatgcagggagcccccgggccacagcatcagccctgcacttcccctccacgtccatcatccagcagtcgagcccgtatttcacgcacccgaccatccgctaccaccaccaccacgggcaggactcactgaaggagtttgtgcagtttgtgtgctcggatggctcgggccaggccaccggacaggtgagtccagagggccccaggagcccggctacagcctcatctccacatctatctgtctgtctcagggctcacagggagagggcccaaaagccaggagcccacctggggctggagcagcagggagctggtagtaccaaacgcctcgattttctgggtctggggacgggggtctgtgtattatgccagggcttgtctatcatggtccggagaggtgggggcagcatctgggcccccttgctcagtcaggctccttgcctttcccatggtccttgccccctcagcaggagtgaactcatgatgatccaacccggatctgggccctgacctcccagcgctcctcttaaacctcggggctgcaaggatttgctagattctagaccagggtttccccagtatcagcactgttgacatttggggctgtttattcactattgtgtgagaccatccagtgctctgtaggatgttgagcaatatccctggcctccacctgctagatgccaggagcacctcctcctccccagtcttgataataaaaaaaagtctccagatttcagtgtgcccaggaggggaagaccatccctagtgaggagcactgtgtcaagggaaagccccgatccacatagctgccacggagactcctgctggcaggacttttaacaaagggttcccaggacggtcctggttctagagtgaaaccctgctgctcctcagccctgggagacacactggctccccccagagcccttctctgtcactgacagaaactcagggttgctcagcgaaagaatgatcccaggaggtggtgggccagagatgacccttcagtgggacaacggtccctggttggaatgtggaggtttctagacctctgggaaaaatccagagcctcagcagcatgctgtaataggagaagctctagctcctctgtagccagccctcccagcttggaagcctgctgcgagaggtcaggcagggaggatgctcaaagggctgtggtggggaaaggcatcccggaagcccacaccagaggctgcctgctgccaccagccccgtgctgccttggtgtgctctggcagagcgagcatttgctaagtgctggtgtattgatttgcggcggggccgtggctccgcctcctcactctgtccctaagggaagccagtcctcttccctccctcctgttcccctcctgctcctttcctcctcgtctcccttctccctttgcccatcgagggtttctcttggctgactctgcagctccttagcatactggtagcttcgcccacctctctctggacaagctctgtccacttttagggccatggagggaagagcagacctgacctctgacagctgctgtgcttgcatcagagatgccagcagagttcacggggagctaccagcctatgcccagcccccaaggggcctggggtctgggatatgccgcagagaggcctggaacattaccttacctgctttcttaactaccgaggcagccaggatttggagtcaaattcaggctggcctagagaccggccaaggttaggccaaggagccaaacctaaccacagaacccttgagaaagtgggtcatttagtcccctggccattctgagcctctggtcctgagggctgggtcctgagcctctcccttgacttgactgttcaagattgaggactctgatatagagccatagtttttaaaaaaacgacagaggactcattttgcctagaagcttctcttcctgaggcaggcacttgctccaagcagaccatggacaaaacaccgcaaacaggcaccttgattaagcaaggagtgtggcccagctggggagcaacttctgagtttccttgtgtggcctgtgtggcctgttgtactgaagagagggagagggggctcagcggggagcctgcttgatggagcccacgcccggcttctgggaggaggctagagacagcactgtgctacacaagaggctgatgcatagctgcagagagccagagggcccggctccgccactgatccagtgggtagggagtggcagcgcccagctgtgcttgcactacagccactgttaagcagtgcttctcagacttggcatgcgcgagagtcaactagagccctggctaacacacagatggctgtgcctcacccccagagcatctgatgcagcaggtctggggtggggactaagaattagcatttttcccaactttctaggtgatgctgatgctgtttctaacctccttgagaatcagaagtcacagatcagttttgcaggaaaatgtctgcatagaagaattttaggctgggcgtggtggctcacacctgtaatcctagcactttgggaggctgaggcaggcagatgattgcctgagctcaggagttcgagaccagcctgggcaacacggtaaaacccctctctactaaaatacaaaaaattagctggacgtggtggcgtgtgcctgtagtcccagctacttgggaggctgaggcagaagaatcgcttgaacccgggaggcagaggttgcagtgagccaagattgcgccactgcactccagtctgggcgacagagtgagactctgtgtacaaaacaaaaacaaaaacaaaaaaaacccagaattttatagacaattgcagaagggttcccagggcacacctatagccatggccttggaccctagggtaataacagccaaggccatgtggagacactatgcagaggagatgcaaagggcagttaagaggatgcctggttagctgtgtttcagggagaaggaagagactgccaagtgaacatgatggagaaatcacagggcccaatgggagagcatgactccgggaggcaggatgcctggtcctggctcagtcttaccatcattgtctgaacagccaggcccacgtgtttatctgtaaggtgaaagtgaggagctggtcgggcgcggtggcttatacctgtaatcccagcactttgggaggctgaggtgggcggatcatctgaggttgggagttcgagaccagcctgaccaacatggagaaaccccgtctctactaaaaatacaaaaattagccgggcatgatggtgggtgcctgtaatcccagctacttgggaggctgaggcaggagaatcgcttgaacccgggaggcggaggttgcagtgagccgagattgcgccactgcactccagcctgggcgacagagtgagactccatctcaaaaaaaaaaaaaaaaaaaaaattgaggagctataccaccttccaggctccttctagctcctaactcctgaggttttaaggcactgcacagtcacaagaccttgaggtttttaaaacctcaactgtaccccagtcagagctgagacatgccagcctggttggaagttacatctagaaactgaatgttgtaaatcagcaggtttcaatgtctggccatatcaggcggggattagcattattgggtgggattaacgatttagatactcctcggggagacaggctctgaagctggaggaaggcagaggccgtcctgtggttgcttggaaggcctctgtgtcccagtcccctgggagcctgagctcgggacacctggagaggaggagtgaggctgtgatcagaccgtcccattccctccttctaggcaggcatggagatgaggggaggcgtcgcatcacctttctctgcagcgctgcaaacccccacgctctgacctgcactgttacctggaactgagggtccctttccaaaacacctgcacaaaagttctccagcccttgacacatatggggaccagcagccactgtttgcttttgtcaagggccactgagagttgtcacccttggagtgggcaggaatgggtcaaaggaaccatttagagggacagtgtgtcagacctagatgctggtcatcgtggtaaaaaaacagtgggcagagaagccagagttcagaagggcgtggctgcacaggccagcctgggcttccgtgactttaaagtgcagcaggaaggacaagtcgatcccacgtgcttagtggtacttgagtgctgcatgcttctgccgacttgttggggagctggcagggatgggggagtggcctgttttgaaggttccagtgagatcaagaatgtcctagagaaacagggcagagaaagataggttgtgattcaggggatctggctggtccccacagaggggacagcgttttttgagcaggtcttgaagggtgtgggaaatagtctttcatacagagagcttcgcagcaagccagcgtgcagtcctgcctgctcggcctgtgttccggaaaccccagtcagtttggaatgggaagtgcagaggggcggtaggggctggaccagtagaggcatccgtgggggccttgaatgcccaactgaggagattggacttcatgttgggtatagctggggccgtggaaggtttcagaggactggagaaacctgagctgatgtggatttgggggagaggattgatgagcctggtggaaagaatcctagcatccctggagtagtcaggcagacatggctgtgaattccaggtctggccagttgcagctgggtgacttaggataaaccatttaatggcccagagcctcagtttcctcagttgtgaaataaagagaatagagcttcctttgtggcaaggcttcccagggcaggcctgttaatgcttggactgatgatcctttgttgttggggctgtcctgtgcaccgcaggatgtcgaggagcatcctggcctccacccagcccctccagcctctttgttgtgacaactgaaagtgtctccagacattgccagtgtctccttgagggggacagaattacccctgggtgagaactgatgctttctggggtgggtcaggggttacacaacagaactaaagcacctggtccagggctggacactgagggtcctgagctgataagcacagtctcagcacaggggagccccatacaccagctcattgtcatcgtccagctgaaatctgtgaggacagaacgaggcactggctggagacatcaaggggatgggctcctcagggcttgctcaccgataggaggaggagcacacagcatcctctctgggtctcgcatccgggtgcccggaagggcggaactctatcccacaggagaggtgctggtttaggatgaagagcgcaggccaggccttcctgagcccacgctgcagtggtcatcagggtcctgttcagagcagcaggaggtgtgtgcccaaacctccagggaggtctctccaaggaacctgcctgggagaggcaggggcgcctctgtctgtcctttggcacctgtgtgtcctgaagccagaaggccaacccacgcaaggccatgcacagggcctggaggagaaaatccagttagaagcaaatgagggcataaaggacaaggaatgcatcctggcagccgagcatccatggcgtctgagggcgttgtacagggaagtcctcctgaagaacctcacgggcactagagctggcagcgatggattttcttccctggccattcttgagagaacaggtcagcaccctaccacccacaggcagtgaggacccaggctgctggagccgaggacgagctccccaacttctggtggcctcctgaggacatgttgtggggtgggtgctggcaggcctgccgtccttggttaggtgaaccagctcagcccgacagccctcagagggaggcaggcatgtgctttggggagccgggggagcagggtgagcgcgctcatctttcctgctgtaggagatggtcttcaggagtgtgagagttctaggtacagctgcacgtatttgctaggtggcacattttggtacctaaaacattttccctaagaagtaacaaaccacccgtcgaacaccccctccctccctcccacaacttcaaaagaggaccaaaaaaaaaaaaaaaaaaaaaaaagagaaacacctgagagaccaaatagaggccttacaccctcacccatcctgtgccctggaggagaggacccaatcctggatcttccaccgggagcgcccgctctcaggagcgagctggcgcggccgcgcaggggagcgtgtgtctgtgtgtgatgtgccttcatgcgtcactctatttatgttgttcgcagcccaacggtagcggccagggcaaagtcccggggtcatttttgctaccgccgccgcctccagtggccagacctgtgccccttcctatgcctgattccaaatccaccagcactgccccagacggcgccgccttgactcctccatcaccttgtaagtggacgatgaaaccgaaaccacaacgcccagcgtccccggcccgtccaaacagtctccactgcaaaaagaaaagccttccccctccccaccaccaaagccccccaacccagagcaccatggacaagagcagagccgagccccccaaccacagcctccctcccgggcctcagtcgcaccagccagcaccccacgagccccctgcccgctgctcccagccggggcccctggcccaggcccctctggggggcgggagggagagcacagctggggcgcgcaggccaggggtgctggcgggggtgggagggggcggggaggcacagccatgccatcttcatgcctgattgctgtttttttttttttgttttttgtttttgttttttaatttttttgttgtttcgttgttccccccacaccaagaaaatcaaatgtaaccacaaggcgacgccaccaccatcccctttttgccttgcccctcacctccatccctgggcccttgggcctcaaagacgcagcaggccagcccgaccccttccccctcagtctcacatttggtttctcgttgttcctctttttttttcccccccttccatccctctcccgtcccttctccgcaattcctttcccaggttagatgttccaaggacgagggagggctgtgggctttggcttacttcatctctctctctgtctctctttcttttcttttcttttctttttttttcctcttaaaccaatgacaaattttgtcaaagggaaaagaagaaaaatcattcgagaggtcccaggtagacccggcgtgaaggacaggaggatggggcgggtgctgtctgtgggccagggtgggcagctctgggggtgggcaggccacaggccagggcagttcggtggcggtgggaggggtggcccatctcacactgctctccgctcgctttgtctctcctcctttctcgtggtttgagttcttttcccctctccatcctcttcatgccatcttcccatctgcatccaccataagacatgaagtcacagtcattggaggtgggcagggtgggggatgggagctgggctacagggttcgggggccacttctggagagaggtgggcagaatctggtgagcatggagtccctgggtgtgtctggtgcagggcagcggcgggccttccaggtaacctgtgacactccttgcctcctctgggggcatcttcccttctgggggtgcagggcctgttccctccagcagggctccatctggacaacctgagaggaactcagggctgttgagatcattttgtctttgggccccaggatggctgctcccaggcatctgagccctagggctctgccaggctctccagcctcctcctcctctattgccttggtcctggaaccacaggcctgttggacctggtgcatcagtcagaggaggagaatgccataggcctgagccttgccaccccctgggcccaagccaggcagccagctcctaggcccttctctgaccctgccctacctggctcagacctccattgggcaccctttgggttccccaagcctgcctgcctggtccttgggcctgcccagagtggtaagaggtgtagcatctagctaggccacccaggttggagaggtagcctggctgggaaggccttcccgaagcagggtggggccggactgccaaagcctccaccctcccctggccccctctcttcagtacctgagaggggccagtgggaaagcagggttatccactgagggtacctggggaccagggctatccccagccctgcccagtgcctcactagcgggtggaactgggtccaggagacttgtctcagcctccagggcctctccctcatcccagctgtgaaaaaggatgcctggctgagactgtggcttctgagtgggtgtgtgtcgggggtgtagtgtgtgttcctggtcagtgagaggatgagggtgtccctctgtagtggggggcaggctcggagcctggccttcagctcagatgcccctctggcccatccttcccactgccagcctaaactcgggcagcatggtctaactcagtctctccctctctcagcagccccgaggggcagtgcccaggtgggccccaaggcctgacagggtctctccctctctcccctgctccccacagcattcgcaacgacaggcgcctcctctgccaaccggtttgtcagcatcggaccccgggacggcaactttctgaacatcccacagcagtctcaggtaggagaccctgcccaccacctggatgcagggaccaggggagtagtcagggttggggggcatcttggtgttagggaagagcctggagtccttggggctaacagggagagagaggtctgaggtggggctggagggcccaggcttttgcacgcccagctgagcctgtctccccaggcagcccccaggctccctggctaatcagctaattggataattagctctgacagccctggccctggggaaggcggccaaggacccaagtctagaggccctctgggccaggcctggtagaagcaaagatggaagcctgaggcccatcgggaggagaatagagtctgcctcactgctttcacctgccccgactggaagccccggcccctagccctcccctttcccctggcgttgggtgggctgggtgacgggtggaggagggacagagggcctggtgggctgcgtgcccagaactggcactgagggcagggcagggcaggccgccaccctagaggcccctcacccaagtctccaggagtcctgttagggagaaggccagcatgctggagacctcatccttgctcctatcccctgctgacaccacccttagttctcaccaggagacagatccccgtcacaagcagggcataagactactcttagccctccaggtggagaccccagaggccagtgcccacagagcccagtgcccttgggggcacagggaagacccatctcaggaggaggacagaggcagctttagggggcctgaggcttttaccacccagggttttgaaaaagaacatgcaaagatctttcttttgcacattttacaaaaacaccaccttggaggtgtcctcagcccggggaaatccacctctctcaagagcccctggggccacctctcatctcctgctctgcctctgttctggggcctgagtccagagaaagttggtggatggaagttgtgtgtgtggtttgagattgtttttttttttttcttttcctttccttccctcaaaaaaaaaaaaaaaaaaaagccaaaaaactttgtcaaacttcaaacttcagagctccctagtggcaaggaggggaggggaagagaacttcaaccccctccagcttcccaccccctttccccagagtcacgtctgacccgtctggtttccaggagcaaccagacatgatgtaacacccagatgaacttgaacttgggggtgctgagaagaaaaacaatggctccgagcaggggctggagccagccccctctgctctgtgccagggaggccgagagagccctgctggcagaggcgggagggggtgcgagaggaagggacagcaggcgggcctcccctcccagctctgggctggcaccaggcttcagggttccatcgctccctccctcctgctgcctgcctgggctgctcacagctctgcggtcgtgcgctccgaggaccactgccacgagccgtccctgctaaccctgtttccgctgcctcctttactttctttgctcactttgcttggacgtttgggggccaagtcagagtttagggaaagtttgtctccccccatgttccctgtgtcttaggctccaggaggtaggaggaaggagtcccagcgggggtccagggcccctgagcaggcaggtgtgtctgggagtggttgggggagcggaagctggacaagcggagctggagccctcgggcctgggggcaggcaggcggctgcaacgggcgggcgcagggggtacagccgggggtggtttccacagtaaccagtgactttagctgatctctggagcaccagatggagagagaacaatagaatgagggaagaaaagagaattttagcaattttgtcattccctgggcagcgctttttacttagttttaatcaattttggacctggctcaggaagtagggaggggtgagcagagaaagccactctgtgcttggcagcagatcccccatttctgggacctgtggggaggtgccggggagcccccttggggcagcctttgtccctaactccagacctggaaccagagtcttccttccctgaggaggaccccccagtctgagcattggcagttgtccccaactgtacagctcaggagaccccaaaggggccagtgtgaggccctggcatgatctgccaggagcagatagggcaggtggggccctccctgtcctattgtccacaagcctcatttgcctggtgaggagaggggtgggcttaccaccagagtcagcctccccctcaacctcggggcaatggcacagggttcctgtatagtctccccttgggaagggggtcccagggaacaggcccaagcctgtggcaggtgggggtcacccagcccaggcgcttcccacccccgggcctgggccagaagcccaggagctggctgcgggccggttctcccccacccactctggggatgcctcaggcctgggtttccgccttagcctcgccaggccccaatgagcctctgtttggcctgtagtcaattgaccggttggacttggggcaggtgctcgaggagccccactgagggagggcaggtctcttgtgcgtactgtccagcacatacaggaaatttagcatttctgcccacccagcagcgcctgctcattgtggcaatcccaaaccgccacatttccagatgctcttgatctgcactgtccattgtggtagccacgggccacgtgtggctgtttacatttaaattattaactaaagaaaaatttagttcctcagttacagtagccacatttcaagtgcttagaaaccacttgtggctagtggctactgcaatggaaatgagaacatttccattgtcacagaaagtgctagatgatctccaaggccctttctgaaactcagtgtccctatcctcagtcccaaaccagagcctgagagcaggtctggcctgcaggcagaatgtttgaccaaagcaatgttttaaatattggaaattttcacacgaaattctgtttgggcttctggcttcttttgaaaagttggcagatgagctgccctgggccctcaccctgaccctaggcagggcacaggcattctggccaccacagaccctgcttcctcgtgctcgcagcacaggcagcagttaggagcacagcctgcactgccccttacatttgaaccctggctctgttgcccgagggctgtgtggcctcaggcaggtcacgtaccccctctgtgcctagcttcctggtggggtcagggcaggggtggagtgaaccaggacctggtatgtgctctgtagttggctccgcctggcccctgcagaccagagtctgtgacagcctgggagaggtcccaagatgcattttcagggaccctcattttgccccaacggtactaccaggtgcacccaggcccagtagaccacagtagaccctgacccaccactttgccaggaggtggggctggagccttggatggagggcgtagccaagcagcccagacccttggggtctgccctgggtgtgctctgagctgagccaccagacacaggcagacaagacaaggccctgtctgtgggaaggcagcgccccctgctggcgatatgaaggaaatgacgctcaccccagggagcctcaagtccttcctcaatgtctggtgccctgagggtagaggatccagcaccatgggctacgtggcccctcccccaggcctggcgctactagggactgaagctgtgtggttcccctgcccccagtctttcagcctgtgggaccttggctggggtatatagatgggaatttctgcttttaatccaaagagacagaaagaaaactcagcaagaagctgggccacccccaacccattcctaaaacccctctgggtacaaaagccccagcctggcatcttccccaccctccaggacccacacaaaaacctaaacaattggaaacatggccagatctcaggcctgtgccagcgccagccatgggggtcccacccgctgggcacagtgcccacgggaaggccagctggactctagcactaggggcagagtctctgagggggcggggttctcgcaggagggagggagagaatggggatgccctttcttctccatgggaacaaggtgggtggtggctgcccggcaccctggctctttgggagctggacccttgaggggccaggtcactgggccaggtaggagtgagatgggacctgccccagctgttctcagtatcgcctctttttcatcctgtttcagtcctggttcctctgataagatcgacaaaagaaacaacaaaatgagaagaagaggttcctcgaaaggggggagaagaaattttgagaatggaaaaatcccccagcccagcccagccccaccgaaaagcaaaaattacacgtcgtcagccactcagcccttctctcctccagcccggggacccccgcgggccccagaagcagcccagttctcagagagcccttggaaggggtctcggtggagctgtgcaccagcagccaagcagaaagaaacacgcgacatggactctgtcaagtagaggacagaaagcaagaaaggatgcagaactgccttcctccccctgaccccgccccggccttctggggaaggaacaaagtccccaaacaaagcaaccagcacaattctgaaggggcctggcctccaccctcaccccttcctaggggaaccccaccctccacacagccggagctgccctagggagcctggagggccagcttgtaaagatgatggggtttagatccctcaggctctcccctccagactccgcccttccctccctccctccctccctccctctctgccaaggctccagcttcttcccccagctgctcccgaccaggagggggagagcagcctccacttaccccaccccacccttgggctaaaagcccccaggcgggcagggggtgacccctggagctagttgcgtgtcccagaatggagggtgttctgacaccccaccctgagccgcaagagcagtcctggggccctggacccctctgtacagtccgtaggaaaaagtcggaatgctctcgacggcctcgtcccagcctgggacaggccccctttcccctctctctgcaggccaggagggcctccttcctgccacgagggaggggagtcgggccccaggtcgcccccgcccccagccctgcatgcaggtgccctcgctccgccccatcagttcctgcccctgcccctcatgcagactgccctgctggggccgggccggagggtggagcagaaaggggaccccggagccgagcgaggaggaccaggcagccgccgctgccgcgctaagccaccacctgcgcttaggtaggcgtcctgctcgccgactttcagttccttgggagggtgttgggtgtcgtccttttcaaaagtgttttggagctttctgtgccccccgactttcccccgcctccccgccccccacgtggccacttttctctggattttagctgtaatgtctttactctttatttaggggtggggcattcattgtttgggtcttttgctgttggaatgggaactcctcctccatttgagcaacttgggaacaatttggtaacacaccacaggaagtagctctcccccccagccccctcctccctcaagggagggttggggggcctgtccagagggtcttcagaagcccccctgggagggaggggaggatgagcacgcccagctcccctccagggtgtgacttggcccctctggcttgtctttctgtgccttactcctcctcctgcgtctcccgttcctggccccttcttgagtccttgtgcctctctctttctctctctttcttaattgtatgaaaacacaaagcacaggtcaggatcctctgagagaaaatcaacattgcaccacgtaggggtgggctatgggctgtatttattgtgaatctagtttgtgaggctgtggccccgagctggcggagggagggaagaggagggagtgacgggaggggaggaggtcagcgacctggggccgtagcggcaggcgaacggtgcctgctacccagctggaagccacaaggtggctggctccaggggcggcttttgttggaagttgagtgaagccctccccctgtcctcagcgtgcagccctagaggaccccagggctgaggggcagtggatcctgcgggagtctcccggggcgtggggagtaaggccccgggggtggggggccgggtgggccgggcgtgacgcgcggtcaaagtgcaatgatttttcagttcggttggctaaacagggtcagagctgagagcgaagcagaaggggctccctgtccggcccacgtgccctttccctcgacgacagtcgagggctcgggctctgtgggactgtgggagctagggtctgcggggcgcctgcccgggcgaggtcggaagctgcaggccagctgggcccgggccggagcgtgcccggcggggctgcccgggcgggcagggggtgggggctgctcctttcccaagtggtgttgtgaggggcaatgagggcaacaggagatgtggggacgtgttaggagagaaaaaaaaaaaaacaaaaatatatatgggggaaattaacttttttttttcattgaaccaagtgcaatgcatcagagagttttcctatctttgtatgttaagagattaagaaaaaaaaattctatttttgttgtaatgtcctcgcggctctggggacgctaaaagaaccgggcctgccccgccctgcgcggggataacgaaagctgagtgtttttcccttttttttgttcgtttttagtttttttttttttaagtcgttttcctgcgttgacgaggatgatctggggtttttatttgtttcgtcgttcgttctgtttcggtgggagggctgaaggaaacgttcacattttagagtttaaaaaaaacacctcgacatttaaaaaatcaaccaacacaagatcaaaaaggaaaaggacgagagaaaaattatttttaagataattaaacataaaaccctggtgcttcttacattataaagtacgttttaaagaacccacaaactattatacataagtttatgaatcaattaaatatcctgcacttgttaggaatacgcatatcccttctttgttgagtttaacggaacgggacagcggcgtgcccccggcggctggactgctccggccgcgggtctccccgggcgcccctccctggggcccagcacccctcctcgccccatccccgtccgggtacgggggcgcggcaggggtccccggcccctcccccgcagaggtcaatgccaacgaacaaacgtcccctccctccctccctctccgccccgagcgcccttctttgagccagacgccaacttgaccctcaccagcattatcaggagcgcgctcagcaagttggtagtttcctcccccctttcccggcgcccctcccgcccccattcaacatctctcatcctatccccgaccccctccggggaacaccgggaaggctcgacgctccaggacaggaccagccacgctgacaggtcgatttgcccaggcccgcgcccgcacgcacgcacgcacacggccccgcacacagccccgccccaccccgcaaccagccctgtcgactgccttatacacccgcccccgcgctggccggccgacctagtgccttgttctcacccccgtgctggcggagcggacgccgcgctctgggtcccagaggggccgggtggctcagacgacccaccactcccccaccctgaccgtgctgaacagacccccccacacgagagaaaataaaggagcaataaagtcacgagaactttcgtcccccaatcgagagcccgaggggcaccccagccccgcctctgctcccccccaccccacccaccctcggggcgcccccctccccccgcaagccagcctgggccagccccgcttcggcccctcccgggagatccgtgcgcccgaccagcaccagcatcgcggaccgcaaaggccgcccgtcccgtcaaacaagtttcttcttaggctaagaaacgcagtatatacgagtatctctatatatagtactaatggatttggtgtgcttcccccttagcgtccccctccctctgctcctcctccttcagcctggtctccccctcttctctgccctccacccccgtctctgcactgagatacataagaaacaagggtagtttactgtctgttttgttttctgggttttcagtgtcctagcggaatgcaagtaggcagccagcccgtctgttccctctccgccccgccccgccccgcccccgtcactgcgcttctgttataccatctttgcctgactctctccggcttctccattgaatggctaatgtgtatgtgaaataaagaaataaagaaaaacaaacgcgagagcgcctgacccttcgctaacgcgaccgtgcgggactgggtcggggtcggtagggtgcgtccccgacttggattctgcgcctctgtccaagcgccgggagcgcagcagacgccgtcgacgagcgtctgcccctgggtctcccggaggggccgacggtgagaaaagcgaagcctccccagcccctcctggcctccccccgcgaccccagcccggaaaaaatgaggcaccacttgggtcctatgactgctctgccatgttgctttgccgacctcgcccctgggaaggggaccgggcaaggccacttccagagggttgtgggtgatttttttaagggtctgcgggtcccttgggggtcgatgatcacccttccggacccccgagaccttgcccctgacgtcttcactggtccttcttcgggggagttcgctcccgaacatgcgcagcacgtccactgccctttccttgacggccctgggccgagtccctggtgccctccggctcagaggtgctgccgcgtgcggtcaccgcacctctgggctcaaagcggtttgctccatcttgatgggccgggccgctccaccggggctgccgtcggggtcggccgggggcgcgggctgcgagcgcgctgccgcctcggccctgcgtccggatccccggcgggcgccgtcgtctgggacccggtgcaccggccgtttgcgaggcccgggaggggtggggcctgcggccagagctgcggcttggtcgcgcagcagccgcaccaggaagccgatgtacttcatggctaggcggagcacctcgttcttgctcagcttccggtcgggcgggtgcgtcggcagcagcttcctcagctcggcgaaggcgccgttaacgttctgctgccgccagcgctcccggctgttggtgaacacgcgccgggccaccttctggggctggtgccctgtggacaaggagggccgggttggtgccatggcccaaagggcggcccctcctgccctcccgctagacacgcagcaccctcgtgggaacttaaacccaggccatgggctggggctttctccacccaaggggtccacgggcagctctccccacccctcccaagagccatccagacaagaatcatcacaggcccggcctacggacaagggcctgctgtatctgtgactatgggcacctttatgtcaatgactgagattccctaaagaaagatttccttgtgtttgtttggtctgggaagctgtccgtggggccctcattctgattgtgcccaagtacggctggctgggtgtactcatgggtctgagaggtcctctcattatgactgtctgtgtcctgtgtcttgtatgactgtgtgagactcttgttatgtctcatggctgtggttatgtgtgatgttgccatgtggctgtttcacgagtggctgtggttgtgtggctgactcttgtgtggccgtggtcctaagtggctgtggtcctgtggctgtcttgtgtgtggttgtggtcctgtggctgtctcttgcatggctgtggtcttgtggctgtcttgcgtggctgcacattccagtggagctgtcattttgtggctcccatgccctggtgtggcatgctctgttttgccgtgactgcggctacatggcttggcctgttgggtggcggtggttgtgtggggctggctatgggactgcgattttgcacatgggtagaacctatgtgggctgttctctgtgtgtgctggaagcacgtctccccgaggtggagtagaggacagacatgagccccacacagagacggccaggccttctgtgcacccacaagtgcacatacaggcatacaaacccacaaggcacacaaacccacactcaccctcagccaggtccagctcacagtggcttggtctccgcttcaaccggctgctagggaagatgctaaaaggtcctgctggcccaatgtagacactgtaaggggtcgtgggtcactaatgccttgtgggcaaggaccctggcccccaatccccactgccccccaccccagatccccactgacctgttgaggaaggggtgagggtggtagtgcagggccaaagtgggcggggcagttcccagggtggagagttgcagcagcgggggccgcagagtgcccagctctgtggtgggcatggctacccctgggggcctgctgtggcccaggctgatcactggtacaccaggtggcagcctggggggcgaggagcctcctcggtggcccacctcctccacctgcgggggcccaggcgaggcaggcttagggggtggggcaggcgctgggctgggggcacacaccatctctgccttctcagtcatggtggggcccacctctgcctgtgcctgaggcgggcacatggaccccgacgtgggggtactcacctgtgggaaagaaggcagccagtggggaggaggactaggtgccccgctcccacctgcttagctcaagaaacccctcaaatgggaaggagggagggggagggggaaaggaggaggagagaagtttcagtaggcaaaggcagatggcgggggcaggcccagaaacttccaggacacgggaggggggtcctacgttagagtaggaggcgccccccaggtgctaggcagcgcactgtccctgagctctttgtgacccaggaggggcgctgttgcccagcctctgagcaaatattccttcttccagaattccctcacctctgcagcctggagagggaacaagacagggagcccctaactgatcctgggatccccagaaaccccaagattaaccctgttatcctcagatctaaagatccaacccagagactcctcattaactcattgatgccatgtgagcttggaatccctccaagatggactctgacccttcacggaaggcccccagcccccacccaggctgaccctctgcacctcaagaatgaccctgcggttcttcccattgctgtccctgaaagtgctccataattgcttgagtgacccccactcccactgcaaacatcccccatagcaaccctgtgaccccactactgacactatgacctcaaatgctgaccctagacccccaaacactgaccccactgcccagtccagtccagtcatgccccaaccctccctctggcttggaagcccccatcctcatcagcatccacgctttttaaaatttgtttatttttttagagacagggtctccctctgttgtccaggctggagtgcagtggtgcaatcatagtgcactgcagcctcaaattcctgggctcgagccatcctcctgtctcagcctcctgagtagctgagagtacaggcatgtgccaccatgcccggctaatttaaaaaaaaaaattttttttgtagaggcaggttctcactctgttgtccagggtggtctggaactcctgggctcaagtgatcctcctgcctcagcctcccaaagtgctgggattacaggcatgcaccacaatgccccgcgatcatccacagttttgcatactgttttgacatccctgtttgctcttggttccagagtccaggatgtcccagcaaggtgtgagactgttggcccctctgccctgtcttcctcagctaggccctggggaagcaggcctggcccctcactagtgggtccctgctggtgaatgaatgaatgaaggaatgaacaaaggaatgcaggctgggtcccaggcccgggatcctccacctttaggcccgctcccctcttaccccagcactgttcttgcagcctggtgagtgccctggctctgtcccgtcagggctggcagtctgggccagggtgtggtttccagcgtcaggccaggctctgctgtctcgcgagggtccggcctcaatgctccaggccccggcgttgggccgcgcctcctcgtgggcctcggaaggccaggatagccgaggtctccgcgtaggtcccccccagggaaagtgagcggctcccgggccggcccgccttctccccgcccccggcggcccggtttcctccctctcacccctggcggcgcagcggccggaggatgctggcccagtgcagataagggccaggctgcctggccgcgcctgataaggagcctggctgaccccggaggaaaccagcgggcggggacctagcagcgcgggcctcccggccccgcccccagccggcgctggcaggactcggtccgccacccctcagggcttcgccttccgctcccccagccactgtagggaccccgggcctctggggacccgggccccagggcagccggggagggaggtgcctggatgcacgcagggggtaaactgaggcagggaagctgcctcctcttatgtccgagtctgccctttggctttgcacactccctgcccgaatgtctgtgctgatgggggtgagggagagccctttccggcccgttggggccgcgtgaccctgggcccccacctcctctcctcacccagcctggttcctctttttacagaggcccttccctcctctccaccacccctacccgggagtggggcacccaaaggggaacagttctaacagtctggccttgggtgtccagcctgggcaggtgtcccaagccctcagcacagtatccacacatttccaagcccaggagggtgagaggaagagccatggctgtcaggggtggggtggggaagttggatttcctagggtgctggggctggtgtgaccttccagtagatgcccaacaggtccccacaactataggcctcttggctacaggatcacataactccaacttggtggtccatggccctcaccccacagcacccggccccttcatggggggcagttatcctggcttggtggtaaacctcaagaccctactggagcctcccacagggagaggctctgggcacagccaggcagcagcagctaccagactgccacccacttgtgatactcatgctttggcccgtctgtgtatctgggcaactgcaagagcccccaggcaggcaggcacccagcagcaggactaccaacccccccccccccccgcccaggaatggggtggagcccaggaccccacgatcaacacctccattgctttcctccaaagaagcaggaactaaagttttatgcagtaaaggccgggcttggtggctcatgcctgtcatcccagcactttgggaggctgaggctggcggattgcttgggctcatgagtttgagaccagcctgggaaacatggcaaaaccccatctctacaaaaaatacaaaaattagctggttgtggtggtgcgtgcctgtagtccctgctactctggaggctgaggtgggaggatggcgtgagcctgggaggtggaggctgcagtgagccaatattgcgccactgcactccagcctgggccacacacctagaccttgcctcaaaaaaaaaaaaaaaaaaaaaaaaattaagcgctaactctgatatcgctacaaggagggtcctaagattagcctcattacagatggggatgaagggagcaggagccagagaggggatcctgccccaggactcttcgttaacgttactaaaccccactctggagggcagggaggggtacagctccccctcactgggtgtctgggcagcagcctgcgaggtccctctttgtgtgcacgcccccctcgccccgggcctcagggcaggaagcacctggtctggagcggatgcacagggcgcctggttccggtccagcttccgccactgtggcccctggagagctgggccaaagaaaccaggcggcgaggaggcagcggcgcgaagacacgtgggggctaccgggcaggagcgccccactatgcgcaagcccgtggcctggagagcgctgaaggtgggagggggaagaggggcagaacccccgcgggagcgagcgcacagctgccgccccgtggccgcttcgggaatcgctggctccggctctggggtggctcagtgaccctcgctgcagaggggccgaccactgtgcagatggtcagctcctacctcccatacagactcaacactccagccaggcaggggcgaacgatccccagaggaacagatcccagtcatgcagctgtatggaccaatacacaaaccacaggcaatcgggagaaggtgacgtgacatctctttattggttcagtctatgcctggcccagcggcagccccaggtccagggggggtctggttggaggtctctggacagtcaggggcagcatcagcagaaaccctgggtgtcggggggctgtgggagtagcagcactggtccccgcgttgacaggtgccctggtgggaagatggtgggtgtgaacccctgcccggagctcagcagcccctgatgggatcctttcctgggatgggaagcccactcccaaacacttgcctggccccagctcccccaattctctccctgttgcccaaaggggagactcatgtgtcctgcagtggaggaaagggaggagggacctcacctccttaaacctcttgcaaggaaatgtcttgagccgggcagcccgctgggccacatcttccggcggctccttccgcttgttctgaagcagcctgcgtctctcctccatagcttcgtcggccgccttgcccctgtgcgaggggaggagtaggtgggaccccatctgccctttaccccttctttccctggctgagccccacccccaccttaccaccactcaccctggccgggcacgaggccggggaccccagttggcctccgggttagcctggaagcgcttgagtcctcgctgtcgggagctggggttggcatcttcccggatggtgaagttggcctgcagcctagggaagcaggggtggggcgttggggctgggggaagctgccacacgagtgtgtccccactccccacagggcctgtccgcctccacaacacagcacgaggtgtctgctcatgtcaggattctctcattcatctaataaacatttttggtttttttaaagagatggggtctcggccaggcacggtggctcatgcctgtaaatcccagcattttgggaggctgaggcgggtggatcacctgaggtcaggagttcgagaccagcctggccaacatggtgaaaccccatctccactaaaaatacaaaaattagccaggcgtggtgccgggtgcctgtgataccagctactcgggacgctgaggcaggagaatcgcttgaacctgggaggcggaggttgcagtgagctgaaatcgcaccactgcactccagcctgggcaagagagtgagcctctgtctaaaaaaaaataaaataaagatacagggtctcactctgctgcccaggctggagtgcagtggtgcgatcgccatcaaagctgcagtctggaactcctgggcttgagcaaccctcctgcctccgcctcaagctcctgagtagctgggacgacaggcaggtaccaccatgcccagctaatttttttagttttctggtagagatggagtcttaattactgtgttgcccaggctggtttcattcctgggctcaagcgatcttcccgccttggcccccaaagcactgggattataggaatgagccaccatgcctggccttaataaacatttttatttaacgactgtgtgcctgcattgttctcagtgctgggaatagacagtgaacaaaatggacaaaaagttacccctggtatgctggtaatgctaattttcttttcttttgggatggagtctcactctgtcgcccaggctggagtgcagtggtgcgatctcggctcactacaaactctgcctcaggttcaagcgattcacctgcctcagcctcccgagtagctgggactacaggcatgtgccaccacacctggctaattttttttttttttttgtatttttagtagagacagggtttcgtcatgttggccaggctggtcttgaactcctgacctcaggtgatctgcctgtcttggcctcccaaagtgctgggattacaggtgtgagccactacgcccagcccagtcagcagatttagttatttttatttttatttatttatttatttatttatttgagacggagtcttactctgtcacccaggctggagtgcagtggcgctatctcggctcactgcaagctctgccccccggggttcacgccattctcctgtctcagcctcccgagtagctgggactacaggcacctgccaccacgcccggctaatttttttttttttttttttgtatttttagtagagacagggtttcactgtgttagccaggatggtctcaatctcctgatctcgtgatccgcctgcctcggcctcccaaagtgctgggactacaggcatgagccaccgcacccagctatttttttattctttttgagatggagtctcgctctgtcgcccaggctggagtgcaatggcgcgatctagactcaccgcaacctctgcctcccaggttcaagcgattctcctgtctcagcctcctgagtagctgggattacaggcacccaccaccacaccatgcccagctaatttttgtatttttagtagagatggggttccaccatgttggccaggctggtcttgaactcctgacctcaggtgatccacctgcctcagcctcccaaagtgctgggattacaggcgtgagccacctacccagccccagtcagcagattttgaatctcacttgaagaatgggcacgagtctgtgtggggcagcatctgtgttgtctgcacacacatgtgcttccatgtctgtgggcagccctggccgctcctgcatgtgcttgcccctacctgggctccacactgagaatgcggaacgctgggctagtctctgatagtcgctcccgtttcaccggacattccttctcctgggggcagaggtcagaggttagggaatactaggcccaagggacctccaggtgaccaccacctgccctcccacctgcatgaggtcagccctgccctcacccagcaacgcatgatgtcccagagggcagaggcaggggcatccgtcttcacagcgttcttacaggcgtgggagagtgagacccggaagtcagcgtggaggagggccgacctggggaacagcagggattatgagggagatgccggactccttgaccccaaagcccaagctgaccagcgtaggtaagactaccttcggcaagggctcatggctacagagttcatttcttttcttttctttttttttttttttttttttttgagatggagtctcgctctgtcgctcaggctggagtgcaatggcgcaatcttggctcaccacagcctccgcctcctgggtttaagcgattctcctgcctcagcctcccgaatagctgggactataggcatgtgccaccacgcccagctaatttttgtatttttagtagagacagggtttcaccatgttggccaggatggtctcgatctcttaaccttgtgatccgcccgcctcagcctcccaaagtgctgggattacaggagtgagccaccgtgcctggccttcttatttattatttttttgaggtggagtctcactctgtcgctcaggctggtgtgcaatgatgcaatcttggctcactgcagcctctgcctctcaggttcaaccaattctcctgtctcagcctcctgagtagctgagattacagggatgtgccatgacgcctggctaatattttggtatttttagtagagatggggtttcgccacgttgaccgggctggtctcgaactcctggcctcaagtgattcgcccgcctcagcctcccaaagtgctgggattacaggcatgagccaccacacctggcctttttctttttctaattattattattatattttaaatggagtctcgctctgttgcccaggttgatgtgcagtggcgcaatcttggctcaccaccgcctcctcctcctcccaggttccagtgattctcgtgcctcagcctcccaagtagctgggactacaggcatgtgccaccacacccagctaatttttgtatttttagtagagacagggtttaaccattttgaccacgctggtcttgaactcctgacctcaagtgatctgcccacctcagcctcccaaagtgctgggaatataggcatgagccaataagcctggcctaattttttttttttttttttttttttaaagagacagggtctcattttgtcacccaggctggagtggcatgatcatagctcactttagcatcaaactcctggcccaaatgatcctcccacctcagcctcctgagtagttaggactataggcatgtatcaccatgccaggctaatgggtgtgtgtgtgtgtgtgtgtgtgtatacatacgtatgtatgtgtgtgtatatgtatgtgtgtgtacatatatatttatttatttatttgttagagatagggtcttactacgttgcccaggttggcctcaagtgatcttcctgcctcagcctcccaaggtactgggattacaggaatgagacagtgcaccgggttctccccaccccctcgcaagttctatgcatgagaatccctggacttgccccaggccaccctgtggtctgggacaggctcctcccgaccccaggggctcttaccgcaactgcaggaggcttggtgtgttgcagtggatggtgctgctcagctggtccagggtgtagtacagaggcacgtccgggagctcctgcgatgggggacaggatgggcatgagtggagatggacgggcacaggtggagcccccttccccgtcacagcccggctctcacctcagtgatgacgctcaggacccctcggatccgctccgaggtgtggaagcggccggggttagcgctcacagcctccaggacacggcccacaaaatccaggtcatggatgggctctgcccacatggggccaccaagctgggggcgcaccggggacaggtgagcagggactatgaccttcaagaccctcttgctcctttgcctcccctggcctagccctacctggtgtcgttgcccacagtgttcacactcgggggtcacagggggaccacaggctgcagagaacttggccctaaacagagaggggtggttggtggggagggaggaaaaccctgggactccccttcttctccttcctccctgctcaccggccgctggggactcctgacgctttgccgagacgctgaaggtggaaggccccgcagcccacacactggaacaccagcgcctgcttgctgtggggggtaccagtggccacgagttcccagcgtgaccacgacaccccaactcctcccttagactggctctgtcccttaagaagccccagatcccccagggcaaggtcctgtctcctctctcaatccaccaccgctctctgcccccgggctgacctggctgaggccttgaccttggcctggccggtgaagacacggacaaaaacacgcacgtagaagtcagcgctgatgctgagcagcggcaccacgaagcgctggtagcagttggcgcggaggtccaggctgtgcaggacgattctcagggcctgggggtggggggtgggtgtcagcctcccctccactatccacccaccccaccaggagccctatgtggtactcacaagtacaggctcagggccagctccctgggatccaagcccacccctgaaagtcctggctgtgggaccctcaacaagtgagtatcccctctctgtgcctcagtttcttcatctgcaaaatcacaacagtccctgtctgtggcactgctgggggcactaaacgagtgaggaaagcatagatccaacctattctgaccagcattatcggtgtgccatgtggcatgtactgaggacccacgttccagcccccaagggctctgtgggcaggaagtggggatactaggtgctgtagaactgctggggcctgggccgggcgtggtggctcatgcctgtaatcccagcactttgggaggctggtcaggagtttgagaccagcctggctaacatgatgaaatccccgtctctactaaaaatacaaaaaattagctgggtgtggtggcgggcgcctgtaatcccagctactagggaggccgaggcaggagaatcacttgaacctgggaggcgaaggttgcagttagctgagatctcaccactgcactccagcctgggcaacaagagtgaaactccatctcaaaaaagaaaaaaaagcaaaacggctagggctttcctgctagtgtgagactctgatatgggaaaggagacagcatttcccgggctgacttcatgacaggaccctttaggaacaagggcaagagccctctgtggaccacgctggagtgcagtggcactatcaaagctcacaataactttgaactcctaggctcaagtgatcctcctgcctcagcctccagagtagctgggaccacaggcatccaccaccacacctaggtaatttttagggtttttttgtagagatggggtcctcgctatgttgcccaggttcctgacctcaagtgatcctcccaccttggcctccgaaagtgctaggattacaggcatgagccgctgcacttcgccactcagccttcttgaatcctgatcagacactcaatagggtcagaccattttttttttttttttttgagacagagttttgctcttgttgcccaggctggagtgcaatggtgccatctcggctcaccgcaacctccacctcccgggttcaagtgattctcctgcctcagcctcccgaatagctgggattacaagcacccaccaccacgcccagctaatttttttttttttttttttgtatttttagtagagacggggtttcaccatgttggccagggtgctcttgaacacctgacctcttgaacaccgcccacctcggcctcccagagtgctgggattacaggcgtgagccaccgcgcccggcctatttttttttcttttttttgagacagagtcttgctctgtcgcccaggctggagtgcagtggcacagtctcagctcactgcaagctccacctcctgggttcacgccattctcctgcctccgcctcccgaacagctgggactacaggtgcccgctaccatgcctggctaagtttttgtatgtttagtggagatcagatttcaccatgttagccaggatggtctcaatctcctgacctcatgatccgcccacctcgacttcccaaagtgctgggattacaggcgtgagctaccacgcccggcctattttttttctttttgagatggggtctccctcccaggctggcgtgcagcggagtgatcttggctcactgcaacctcgcctcctgggttcaagtgattctcctgcctcagcctcctgagtagccgggattacaggtatctgccaccatgcctggctaatttttgtatttttagtagagatggggttttaccatgttggccagctggtctcaaagtcctgacctcaggtgatccacctgcctaggcctcccaaagtgctgggattacaggtgtgagccactgcgcccggccttcagaccatcattgtgcccattttacagatgcaaaaaaacccgaggaccagaaaggtgaagtcacttgcccagagctaccagcaaagctaggatttaaacccagtcctggaaaaacgacctttaaaaaaaaaatttttttttgaaaagttgttttaatacagaaaactaaaataatgtggccatgcactcctgtcctggccaaagccactgtccccaaatgaccatgattatcagccatgctcttaggaactatgtgggttgaagacacgcctgtcgttaacagcctgggatgcatctggccatcagcctggaggaagctgagcaggtctgaggagggggaaagtgtattgggaagggactcagacaaccacctgtcccccggtctccctggctggctggcagagggcccctcaccatctcgtggcaggcccggctcttgagggccatggccccgtacttgctgtagcacgtctccccgctgttccccgccaacaccgccatgtctgtgcaggtcacacacagcaaccctgcagagaggggctgggcagtgagaaccctccaacaccccaagccctgctcccaccccagtgccatccccacctcacctccttcactcacagcctgcacagctgcatccaggaaggtggctgggctgccataggggtccagatcgatgacgtcaaacctctccgacaccctctggtgctggtacatcagcatcctgggtgcaaagagggccaggtcctcagcctcccacgccaggtaccttctctgtcccctacacatattaactcgtacagcacagtggtttgggtctgaactccggggccagattcccaagttcaagtcctggctcagtcatttatttatttatttattttatttttgagtcggagtcttgctctgtcagccagctggagtgcagtgttgtgatctcggctccctgcaacctccgcttccccagttcaagcaattctcgcgcctcagcctcccgagtagagtagctgggactacagacatgtgccaccacgcccagctaatttttgtatttttagtagagatggggtttcaacatgttggccaggctggtctcaaactcctgacctcaagtgatccatccacctcggcctcccaaagtgctgagattacaagtgtgagccactgcactggccttggtcatttattaaactgcacaattttcctacttaggaaaagcaccatgtggaactcagtccacacatctaaaacaacaacaatactgatataagacgtatctgcctgacaccatttcaagcagtttatagatgtattaacacattttttttttcctttctttggagacagagtctcgctgtgtcacccaggctggagtgcagtggtgggttctcggcgcactgcaacttccacctcctgggttcaagcgattctcctgcctcagcttcccaagtagctgggattacaggcacgtgccaccatgcctggctaatttttatatttttagtagagacgaggttttaccatgttggccaggctggtctcgagctcctgacctcaagtgatccgcccacctcggccttccaaagtgctgggattacaggggtgagccactgcgtctgacctcattttaaaatttttgtagagacgggtttcactgtgttgcctaggctggtcttgaaatcctggcctcaagcgatcctcctgccttggcctctcaaaatgcttgattacaggcatgagtcaccatgcccagctaattacttttcattgtctgtgattactatttggattctagtaaggtcagaaaagtaaaaacttttttctctgtaaaaggtcagaaggtattttaggctttgtgagtcatatgtggtccctactgcatagtcttcttttttaacctttaaaaatgtaaaaaacattcttgggttgtgggccattgataaactaggctaggccgggcgcagtggctcacgtctgtaatcccagcactttggaaggccgaggtgggcagatcacttgaggtcaggagtttgagactagcctggccaacatggcaaaaccctgtctctactaaaaatataaaaattagcctggcatagccaggtgcagtggctcatgcctataatcccaccactttgggaggccgaggcgggcagatcacgaggtcaggaaatcgagaccatcctggccaccatggtgaaaccccatctctactataaatacaggtgggtgtggtagcagatgtctgtagtcccagctactcagtcgggaggctaaggcaggagaatcacttgaacctgggaggcggaggttgcagtgagccaagatcacgctagtgcactctagcctgggcaacagagcgagactccgtgtcaaaaaataaataaataaataaaaataaaaattagccaggcgtggtggcacgtgcctgtaatcccagctactcgggaggctgaggcaggggaatggcttgaacccgggaggcggaggttgcaatgagctgagatcgtgccactgcactccagcctgggcaacaagggcgagactacatctcaaaaaacaaacaaacaagcaaacaaacaaaaaaaggctgtgagccccacaggctatagtttgccaactcttgcgaaggtcaccaattttgcatgttttgtttcctgatgcatttccagttcttgaaaacggtgcctgacacatagcagacactggatatactatggctcatttgaatgaataaaaggagtgtaagaagttaaaacagagaccaggatgctacttatttctggcacagagtatggatcataccataattatctattactcatcacagcaacccctgtaaaactaattttctcagttgacagacaaggaaactggggctcaaagaggctaagtcactcactcaaggtcacagagtgagaatgtgacagagccagaatttgaccccaggcaggcttgtcccagagctaggctgtgatgcccagaacctaccgggcatctgcttggctcggctgtaccaggtgggccacgtcattgagctggacattccggcgtatgagatccacagcccgggtggaggcatcgtttgcaaccacagatctgagcccaggcacctctagggcaaatcgaatggaacgtaggcctgaagctgccaggccttccagcacatgcaggccttcctgttggagtaagcagaaaacctccctcacatctccacctccatcctcttctgggccccaaggagcccccaccacccacctcctatagctctccccctccaggagccctctgtctcccgctaaattccagggctgccagctcctatgctcaggccccacctcacagatctcccccacggccgctgtgcgaggttggtctcctgaggccaggttttcactctctttcagttcaaccttttcctcctcttgctctgacaagtccacgaccactttttgcgtgtccttctctcctggaaccttgactgcagccacccagaggcacaagtcagagaataacaaggtcccctctgagaaacctccccttaatctccaaaatatcgtccctgaaatccctgcggaaaggctgaaggagcagaacccagggcctgctatgtggctgaagcccctctggatttgggcggcagaagagcccaggcagggagataaacttgtgtgacccccgcccaccagaagcctggacctccactcactctggattcctttggccccaagctgaatgcgagcaaactcggtgatcacagcacatctggtgggagacagaggactagctcataccccgcccccgccatccacactgacccactagccgatgccaggctaacgtctgacccctgctcacgtcaggtcccgattgaattcctgcaccgggttataaaagacctcgttggcactgggaaaggcgattttggcagccccctcggtgactgtcgtctcctggacttcacgtggacgttcttctccgtagggcccggtgccgttctccatcgctgctgtattcggcagccctggagactgccactcgaaaaaccgggctctagagagcacccgggcggagcggaaagtgaggcttagccacagagacgatccttgcatgagacatccgctggcgcctccgcccgccaagcctggttcggggggcgggggagggcacagagagggtcagagagccgcattccgggcccggggatgtcctacatatctatgaggtagggactaggaaaacctgcggcctcggtaagctgatatcccctcgttttggggatgactggtccctgtggagccgatgccctcgtgcaggcccgccccgagtccgaatccctccccgcgctgcctagcccgtcctcacctgctctcgtagccacagaaaaccgaattagtcaaggtgcacgtttcccgaattaggacctgggcgccgccatgttggcacagtgggtgggcgaatcacatgatagtggttggccagtcaatgaggaaacgtacggtgggcggccgggatcaaaatgaaagccataaaggaagcgcgctgatcgtgctgttccgggggtgttaatcacagtggatcccctgggagaggacacgtccctagtcccatttcacagatgaggaagttgtggctcagaaaaggggcggtaagcggagaaacccaacacttattggtcctcttctgtgttctgggtgctatatacacattatttcagagcaccctgcaggaatgactcaggctctggagttggatttaccgggtttgaatctcagtcccatcacatgctctgggcaggttactcccgcggcttcacttttcttacctattaaatgagaatcgtggtttctcagatagagcaaagattaaatgacagattcctggaaagtgtgcaaagaaccactctaacattgtaagcgctcggtaaagttctaaccagtgtatgaaggcaggacagcgaagtggtcccggctacctgggttccagtctcagctcgccctgcgacttgttaactctgaacttaagttaccgcttttgcaaaatgggcagaacttttttttaccatttgttactgggttgtagtgagaagtaaacgagttagtgcaggtaaaatgctaacagaacctagcatccggtaagcatcataaaagtcttaggtcttattgtcgcttttgagcctgtgtttaaatcctggcacctaccatcacttccttgctgtgtgatgatcttgaccagctttcttcatttctctgtgcctccttttctttctttctttcttttttttttttttttgagacggagtctcgcccaggctggagtgcagtggcatgatctcggctcactgcaaccaccgcctcccgggtgcaagcgattcttctgcctcagtctcccgagtagctgggattacaagcgcatgccatcacgcccggctaatttttgtatttttagtagagacagagtttcaccatattggccaggctggtttcgaactcctgacctcaggcgatccacccacctcggtctcccaaagtgctgggattacaggcgtgagacaccgcgcccagctgcctttattttctatagtgtgtctgtagcagttctcactaaaaaatgttactgtgtagtttaaacgagctaattcccataaagaatgtaacgcagtgcctgccacaataaacagcagtcattattgtttttgttttacaggaaactaaagttcggaaaggtagagcgacttgcccaaggtcgcgggactagaaggtggcggggccaggattcgaaccatcgagctgagccgacgtactggcgaggatcccccaggggcatagagaggagacggagccggttagaaggggcgcgctcggagctcggctggcctcgcctggagggcggggcccgagggcggtgcgcgggcggggccggggccgctcctccctggcctggctgcggcggcagcgcggcttgcgctcgctcggcgctcggctggggcggcctggcccacaatgaatggccgccgcggctgccgctgctgctgaggcggaggccgcggaggccgcggaggcggaggccgaggccccggcgcagcggggcgcgccccgggcccaggcccggccccagccgccgctgcggagcccgccgggaccccccggagcgcggccacggcgcaggtgaggcggcccgcctcaggcccggttccggcctcctccagccggggcggcccgagggctgagtggggagggcctgggtgctttctcggaccgaggaggagccgggcccgcagcctgcactgtgcccgggcaggcgagtgtgtggaggcccagctaccgcgggcggccttgagcgtccagcccgagcttcagggcttgggggcggcaggatcgtacctggaccgctcccccgtctcccagcgagggagggggccaggtcgggccggggcaggtaccggggatccggggaagttggagggtccgaggcggaaaagtgaggaggttctcgtggatgccggagggggagggggagggggaggaggagtcgggctccggccaggccgagtgggggaggagaggagagcggcgcggccggaggggggcggggaggggccgggcctgcaggtaccgcctgggcgctggaggaggtgggtgggtcaagttacaggcctgggggcggctgaggagaagcccaggaagtggggcacggcgggtgtgggcggagttacttcgtgtgggggcggataggagatcccagagatgttttccgggggtcacatgaggtcaggactcagatgtggggagggggaggctagatgtgggggcgatcaggtaaggtgagggactgctgtaggagttttgggagtcgagagagcagagccttttgggctaggctaggggggatgtgggggcaggtcaggaaaagctggtgtgaccagaaggtatatactaagatgcgccccccaccgcccccaactcaagtgttaaggggttccgtctttctcacacctcatccctgaagcctctagagtcctgaccctaccccttgggcaagcctctgccaactgttcaaaggcactggccagtgggtgtttgtgtgggcagctggagacagtctggaacacctagcttaggcatcttgtttatcacaaggtggcccttgcccacccccaccttatatatctacagggaggcagcccagcagacgttacctgggtattttaggatcctgcattctttctctaccttttgtggccagaagctggtggttcaagcctagtggatgggacctcacagcaaccatcgtatatattagtaccatggcctcccaggcaccaactccttgagcctgagttctgtgtgccatctccctgggggtgaagaattagagggaatgagcatgtaaaactctgttgatggtggtttggaggctcccgacggggtgaaggcagggcacagagaagagttaaggggatcaaatcaggcactcacaccctggcccagggatctacctctgggacactcgtcctgggccaggccctgtgccgagctcgctggtcggatgagctcattgatggctcaccaccaccagttcaacttaggccttctctggggtccagacgaggaagctgaggctcggggtggtgtggcttgtctcagatcacatgagcagacagtggctgaactgggattgtctgaccctcagcccaaacccatagtcactcaagtggccttccaggagggtgactgaaggagctcctcgttctggattccctggcgggcgttctcctccgtccaggccttcccttctgctcaccccgggggatgggtcaatcccctttgggacagactgagtttccatggtgtccccggggaatggaacagtggaggtatctttctcggaggcctggtcaccccttcttccccatttccctcctgggagccaagaggtcaggagtcatggaactgtgggctgaccgtgggaagctgaggaggcctggcaccaccagggctggacttgactttgcttgcctagactgtttttgccccactttggcccccagtcggatggcagcagcttttgttcctttctgggctaattgcaaggctgttaccagggtgtccttgggactttgatttgggatcttcagcacctgaggcaggagccacaaactgctgggtcaagtggtgtcagccagttctgggtttaatgatgggttgtcaccctaattctccccagtctccctatagttcccaggacaccctccaacctgggccctgcccttcttgcctgtctggctagccacttggttctaggaggagtaggaactgggccagcagtcccgcaaagagactgaaccatccttcctggctggttgggccaggattgctgcaggtctgcttcagcacagactgggtcctcctggacctaagctgggttggataccagggataggggattggtggtaccatccagtcacttagctgagactgttgggagttggccctggtgagtgggggacaggcagtgcctcaggcagctccggtttgtgcctagaggtagaggagaaggcaccagtaataactgcttttcggtgagaacttagcatgcacagactctgtgggggcaagtgcaacaagtaggcagcccgttgagacagttttatttcactgctgggtgctgactccccgctgggggctggggaagcatcccggagtaacagatccagagcagctagctctcaagcgaccaaactttcacaagcaaaggatcaagataatttcacatacttctgtgtttacaaagatggtgtagcaaagtgaagtcattatgagccatgaggggatggggaggtttcgatgggtggccggaagtgttcccggagagctaagatctgaataataatgttagctaaggggtgggtggtgctggggcgcagggaggggtcagtgttctaggctcaggggacagcacattcacagcttttcttgagtatgtaccagtcttcttctgagtgctctaaacattttgtcttcatgagggaaggagtggggggatgaccctactgtggagacagagactctagtaccattcacaagagagtgaagccctgtctctgggtctcctggatctgcccatcacccccagatggaagttcagaaccccttggcctgcatctagggtatttaaaaaatctggcctcctggccgggcagcagggagccccagcaggttcttgagctgggctttgaggagatgtgagttttggtcagccttacagggtctattgaaggagtctgcctggaggcccgggggtttggagagagtttggggttggcccaacattgtctgaccctagatttcatcagtgtcattgccagagcctgtgtggagagagggatcccatcaggcttggtggggcatattgcttttgggatggtggtgagccaccggggctggaaaacatgagtcagtgttcatgccactctgcgtcctcagatcctccgtgcccctcgtttctcctcctaggttgctctcagcacttgtacacactcgaactcatttaagcccgtggctagcaggtcctgcctgttatcatcatttgacacacaaggcaactgaggcaccctagtccttccttcacacaagctgcaaagtggtctggctaccacccctgtgccgccttccagccactttcatgttcctcgtgtctgcatttgctcctcagtcctctcagccgctactgccttcccctagagaaccctctgggccgcatgaggtggggccgggaggtgggactgggcctgcttgcacattaggtggggtgaggaccagccgagccggcagaggtgacgtgtcttaggttgtgatctgtgtgtggttgtggtcatgtccctccagccttctcatgtgctgcctccttggcgaaggtctcagttcttagagacctgtgcgtcttctctgagggctttgactgtgtccagttcgtggtttctaaatcgagcaaagggagagggtaggtaagggtgagcagacacggtctagtagagagtgaaatttcacacttagcaccacccctgtctcagccatgagactctgggcaaaggtctttacctctgagcctcagtgtcctcctctgataaggagtgacaagtgggcacaactatactgctgtgattcgcaactgggtacagtcctacctccggggacacttggggaatgtctggggacatttttggttgcccctgccgggggggggggggtgtgctgctggcatctagtgggtttataggccagggatgcggttcaacatcagacagtgtgtagggcagcccccaccacaaagaatgattgacgcaaatgcagtggctgggtggggaatctccactgtctggttatcatgaggtttgcgggagaggttggcgtctggggtgtgagtggacagtgctgtgaaggctctggggaaaaccccagcgatcactgcctgttaatcccatgaaatgtgcgaggtctgggagatggtgagaggcataagatgtcttctactcccagggagtttgcggcccagcacggggccaggggatacgactaacagcagctggcattcatgagcaccgactacggggcgagcgccgatcggcctgtgttctttggttgtttaatccttgaaatagccttgtgaggtggctgctgctgtcagcccattttctagatgggagactgatatggggggtgagcagtattgagggtaattctgagtgacaagctctataagggatttgagcctagtacaatagtaggattcaaaatcttaggtcctgcgtggttccctagcacagcccagcaggcccctctcccaggatgatccccatccctccaccctcctttgtgttagcggcaccagggtcacctcagggcctttgcacttactgttgttccctccacccttggttgccgccactgctgccctgtcttttgggtatgatctgattacacgcagggagtgggatgtaactccgaagggtgggcttatggttggagttggtggggagggagcgggcaggctgcgagctccatgaggacggaggcagagcttctgccaggctctccaaggagctggagctgctgcctgcaaagggaggccagattgccgagggctgcgaggaggagcgagtgggaggagggagaggcagcacgcggagactgctcattcccggagatggtggttgcagggagaaggggctagagaatagctgcagttgggaggattgggaaaggaagaatgaaaagaatgaagaaggccttccttggggattagagagagggcaccccagaccctgaggtggaggtcctcagacaggcagaagaccctgtttctggagaggacacatccagtagctcaggtaaagagccccagctctgggctcggccggtccggggttcccgtctggtctctgccttgcttctctgaacaccagttttcccacctgtgaaatgggtctagtcacagctgcctcacatttttgcctgattcgggagccagacggcctgggtataaacctgtgcctgccattcaccagctacatgttccccacctctggcttcacctctctgggcctcattcccatccatgaaatggcaggcaggctcatttcttcctcagaaactgtaaagaagagtaagttaaatgagcctgtctgagccctggccaggtatgggcccagtcagtgaggcttgagtaggggacactgttactaatcctattccaccatggatttaacaatagtcattcagggaaagagataacgaattaaatctgtgggtgtataagaaaaaaaatacaggccaggtgcagtggctcacgcctgtaatcccagctctttgggaggctgaggtgggcggatcacttgaggccaggagttttgagaccagcctggccaacatggagaaacccagtctctactaaaaatacaaaaattagccaggcatggtggtgtgtgcctgtaatcctagctactcaggaggcggaggcacgagaattgcttgaacccaggaggcggaggttgcagttagccgaaatcacgccactgtactccagcctgggcgacagaggaagactgtctcaacaaaaaagaaaaaaaaatactgatgcaagatgaggtcttgctgtattgcccaggctggtctcaaactcctggcttcaagcgtcttcctgcctcagcctcccgaagttctgggattacaggtaggagtcaccgccccccactgaacagtttgttcttcactaactgttttcctggactgccttcacattcagcccctacagaggggtctttctggttctgggtcaggcaggcaacctgagtagctgccaggatccagccacatcctgctgagctgcatgaaggactgtggggctctctggggcctttgttccttgttacacttggagttgctggtctcccttaactggcttgtaggtcttagcccatctgggctgctgtaataaaataccttagactggaagccaggcacattgctcatgcctctaacctcagcatttaggaggctgagatgggaggattgcttgagcccaggagttcgagaccagcctgggcaacatagtgagacctcatctttacaaaaaaatttaattttaatttgtttttcacccgtgacacagccctcaggaggtcctgagaacatatgtctctcgtctttgcaaaaaattgttttaattagccgggcgtggtggcacacatccctagtcccagctactcaggaggctgaggtgagaggataacttgagcccaggagtttgacgctatagtgatccaagattgcaccactacgcttcagcctgggtgacagagcaagaccctgtctcaaaaaaacaaaacagactgggccattgataaacaacagagatgagctgctcatagttgtagagggtgggaagtcccatatcacggtgctagcagattccgtgtctagtgagggcccatctctcatagatagcaccttttaggtatctgcacagggtggcaaggacaaacaagctccccctcttttatacgggcacagttcgtattcatgaggacagagccctcctgactgaatcaactcccgaaggccccacttttttttttttttttttttttggtgagacggagatttactcttgttgcccaggctggagtgcagtggtgcgatcttgactcaccgcatcctccgcctcccaggttcaagcgattctcctgcctcagcctcccaagtagctgggattacaggcatgtgtcagcatgccaggctaattttgtatttttagtagagacggggtttcactgtgttgcccaggctgatctcgaactcctgatctcaggtaatccgcctgtctctgcctcccaaagtgctgggattacaggcgtgagccactgcacccagccctttttaaatttttgatcaacaacttcttttttattttgagatggagtcttgctctgttgcccagcctagagtgcagtggcgtgatcttggctcgctgcaacttccacctcctaggttcaagcaattctgcctcagcctacctaatagctgggattacaggcgtgcaccactgcgcccagctaatttttgtatttttagtagagatggggtttcaccatattggccaggctagtctccaactcctgacctcaggtgatccgcccacctcggcctcccaaagtgctgagattacaggcgtgaaccaccatacctggctgaaaggcctaactttttttttttttttagacggagtcttgctctgtcaccaggctggagtgcattggcccgatctcggctcaccgcaaccttcgcctcctgagttcaagcgattctcctgcctcagcctcccgagtagctgggattacaggcacgtaccactgtgcctggctaattttttgtatttttagtagagatggggtttcaccatgttagccaggatggtctctatctcctgacctcgtgacctcgtgatccgccctcctcagcctcccaaagtgctggggttacaggcgtgagtcaccgtgcccagccagccccacttcttaataccactacattggagataggctttagcatgtgaattttgggaagaggcaaacattcagaccatagcatctgtcgacggccatgtcacagcttccctggaaagacatcaggaaaggactgtgcctttgacagtctctcacaggcccatgctggctggggaattcctcagctctcttccctaagagctgacagttactactcccaggaatcatcctgccagcccccttcctgcagatggcaggatccaccggcagtgtgagcaattcgtcaggtaacactgcggtctcaataggcccctgactgctggctacccaccttggcagctgtcaaaggaggtcgtctgtctgcccagccacagataatgcttctgagccctattcctgtttgagccacgttaatgtggaacaaaacagggagttaggttaggaggaatggaagtaattctttgttcattttttccacgaaggactgtgagcacccactgtgtacctggccaggtcctaggggtagaggacacaacagggatctacacaggcaaactccctgccccagggaaactgacatgaagccccaaaaaatgcccagtttggcaggggtggtggctcgcacctgtagtccgagcactttgggaggccaaggcaggaggaccacttgagcccaggagtttgagaccagcctgggcaacattagggagacctcgtctctattactaaaaaatgcacaaataaataatttttttttagaaaaagaaaaatggccagcttgctaaataaatcataggaactcccaagaaggataagtcaagcagggagaatcaagccagggagttagtgtcgggaagggctttgttggtcagacgcagtggctcatgcctataatcgcagggttttgtgaggctgtggcaggaggaacactcagctgggagttggagaccagcccaggcaatatagtgagatcacgtctctaccaaaaaaaaaaaaaaaaaaaagcatacatatacatatactttttttttttttttttttttttttttttcggttaactggatgggccgggtgccgtggctcacgcctgtaatcccagcactttgggaggtgggcggatcacttgaggtcaggagttcaagaccagcctggccaacatggtgaaaccccatctctactaaaaatagaaaaattagccaggcatggtggtggttacctttaatcccagctactcaggaggctgagacaggagaatcgcttgaacgattcttgcagtgagccgagatcccaccactgcactccagcctgggcgacagagcgagactctgcctcaaaaaaaaaaagaaaaaaaaaaattagctggatgtagctcctgtggtcccagctatttgggaagctgaggtgggaggattgcttgagcccaggagtttgaggctgaagtgagctatgatggtgccactgtactccagcctgggtgacagagcaaggccctgtctccaaaagcaaaagagtagagaaagggctttatgtgaccagggagagtatgaagagctatggctgtcccattcccattctagtaggtccgagagcaagcagggccagactgccaggggccccaataaagcattgtaggggcccaggcagtgtcacttggggccaaggtagtacaaagtggttttgaaggagttgaagatgaatccaaggatctgaatgaggagggccagagctggtgaagctacggcattcacaggttttgggaaggactggagccaggtcctgaaattgttgagtggaggtgtctggggtgtgtgcgagtctggcattcacagggaagtccgggccaaagactccagtgggggaggcatcagtgaatagatggtgcttcaggcctgtcttagtcagctcaagctgccacacaacaaaatatcacagactgggtggcttaaacaacagacatttatatttcagagtgctgggggctggcagtctagatgagagtgccagcgtggtcaggttctggtgagggctctcttcatggcttgcagacagctgccttcttaataccaccgttatgacctcaattaaccttaattagctcccaaaggttttatctccagatacaggcacattggggctcagagtttcaatctgtgaatttggagggacatactttgtccatagcagagccctgagactgagcccagtcccctggaggtgaaaaccctttctggaagggccacactccccatccactactgcccttcctagatctcagctccagtgtcaccccttctgggcaaggtcaggcaccccagtgtgtagcacattgatctgtgtgaccaaggatgaatggccctgtctcctgctggactgtgagctccagaggcagggctactttgtcaccattgtggcctgcccaggcagggacctggcaaatatttattgagtagttgttgggaagtcatggaaaccgtgtgctgtgcccttgggtctcaccagaagatctgctcaggcccagggccaggactaggcactgtcctggccaggaaggtcccagctgccctgtggcctcctgcccttgtcccccacaccctcaggggtgctgatatgctgaattttaaggagagatgattctcatatggttttctgcccttggggagtttatagtcaagtgggacttagtttcctcagaggtaagcttaagggcactgtggccggggtggggcaggagagggacatcttctctagcctggagaagtgagtagctgagggtggaggaagagggtattccaggcagggtgcacagcttgggcaaaggcctcgctgcagtagaggaggaccaggcagtgtgtttgagcctgacttaggtggggatttggtggggactagaaccattaggtggtttagagacctcaatcctcgactccatcccacccctgcttcagccagcaggtgaccctgctagggacctgccagcgagagacccgtttcctctgagtccagtcatgctagctcccttcctggggctagcgtgggtgagggcttcttgcaggggcccacatagtttttctcctgagtccattgggcaggattgggccggattgggccaatcacagagggatggaggggttcccagagatgggtctgctctggcccacactgcagctcacccctgtccactctgtgcgggggccactggggaactagacgaacagcattcaggtcactgtggctcacagacccgtcgccccactccgctcgtccccagcagcatggagggagggagagctcccgtgcgctaattggctgagctatttggaccaattgctaatcaaaggctccaaagccctgggtgctgtggtgctgggctctgaagctgaggttcacaaggtatgggggacctcagtctgagcatcaggttggctctcattctcaggaggggacctgggccaccttcccaacccccacatctctgttgcctcctattatccccgtaacctttcagtctccattgccaaatgggggggttcaagaccagcctggacaacatagtgagaccctgtctttaaaaaaaaaaaaattacctgtggccggtgctgggtgcttggtaaggtcaccttgaagcagtcctgtgcccgttctgcactgttttgtttgtttgtttggttggctggttggttggttggttttggtggggtagtggggtcgggggatgtggttttttgtttttgctttttttgttttagagacagggtctcgctctatgacccaggctgaaatatagtggcacaatcatcactcactgcagcctctaactttttggctcaagtgatcctcccacctgagcctcccaagtagctgggactacaggtgcaagccaccaagccccactaattttaaaattttttgtagagataggggtctcactatgttgcccagactggtcttgaacccctggcttcaggggctcctcctgcttctgcctctcagagtgctgtgattacaggcgtgagccaccgtgcccagcctctctgcactgttctttaacacatttacaaatatttactgagcatctatttcattctaaagaactaatcttgaataaaaccagccagaatgtttgccttcattgagctgacagtgcccttggaggggttaactgtacatacacctcttttttcttttcttttttttttttttttttgagatggagtatcactctgttgcccaggctggagtgtagtgactcgatctcagctcactgcaacctccacctcccaagttcaagtgattctcgtgcctcagcctcctgagtagctggaactacagatgtgcaccaccacacccggctaatttttgtatttttagtagagacggggtttcaccatgttggccaagctggtcttgacctcctgacctcaggtgatctgcccgcctcagcctcccaatgtgctgggattacaggcgtgagccaccgcgcctggcctgtacatataactcttaaaatgctgccctgaccctggggctcactttcaaagatgtccacactctgtaggccaggaccccacctgtcccatacccttcctggcagccctgtccctgctacatcgcccttcagctacaccagctttctttgggtccctggaccacacctgataccttcccgcccagaagtgttatctctgtcctggcagttgctcaaccttttatggtccctaccaccaaggccatctgcttggttgacatacccaccccaactgtaattaaatcatccccggtgtctcctcactagacagctccacataagcacagctggtccttttagggctgtgtccccagcacctcccacaaaggaggatgcagttcatcaggatgggttggatgaacagcccattttacagatgaataaactgaggcacaggcaggtgcaggattttggcagcactgcacacctgtcctggctttgtcctcctccctggggaatgagcttggagcacccctctaggaactgggatgccagcctcttcccttgaccatcttggtccttgtcatgtgggccccagtaccaggggtggctttaatttggctgcccagggaggtggttcagggctgccaggacccctgaagtaggctctctgggctctgtcctttgccccccaacatggtgcctgtttctcctgcctcttcatgcagagtggccagctcctggcccattcagctctgagtttgagctcctgggcggagatttttgttgccttgtaactgggattcctagatccagcctccaccctctgattgccctaaggaggttttggggttttgttttgttttgtttgtgttttcgtaggatggtggcagtgattttgaggaggggaagaggaaggaagatacaagcaagggaagtcacaggctgtggtgcctaggcagaccctggtttgaatcttggccttaccactttttgcatgtaagtggtaggggcagcagatagctcaggacatatcttgggtttttttgtttgtttttgttttgagacatagtctcactctgttgcccaggctagagtgcaatggcacaatcttgactcactgcaacctccaccctcccgggttcaagtgattctcctgcctcagcctcccgagtagctgggattacaggcaccggccaccacacccagctaatttttgtatttttaataaagatggagtttcaccgtgtttgccaggctggtctcgaactcccgacctcaggtgatccacctgactcggcctcccaaagtgctgggattggccaggtgtggtggctcatgcctgtaatcctacactttgggaggccaaggcaggtggatcatttgaggtcagtagttcaagaccagcctggcctatgtggtgaaaccgcatctctactacaagtacaaaaattagccggacatggtggcacacgcctgtaggcccagctactcaggaggctgagaatcacttgaccctgggaggcggaggttgcagtgagccgagatggcaccactgcactccagcctgggtaacagagcaagactctgtcttaaaaaaaaaaaaaaaaaaaaaagtgctgggattacaggcttgagtcatcccgcccttcaggacatatcttttgaattttgaacctggtgaatgaatttttagatgacctcaggacagtcctcaatttccacatgacctcagtttttccagctttgcaaggggagtatgaaaccagccctgaagtcttgctaagaggattcggggagctcatagaagttgtgagttggttcctccattcgcctgggtgttgtaaggggcagggcctgtgtcttgcttgtggcctgccagggtagcagctcagtaagtgagatggtatctcactgtggttaggattcacatttccctgatgactagtaatgtttccgtgtaatttcttgaatgatcattcagtaacaataagtgtaggttgagtttgtagaatcaggttgacctcctcagcctcgatttccaaatggagaaagcagagatttggagctcctggtcagaggagcaggtcggtgctggagccaggactcaaccttaggttgtacctctgagcctttgaacacttgccgtttctattcctcacagcagccctttcagacggaacgggtgttaccagattaggaggagagtggccactgtattctcagtgcccagcccagggaggcagatctgagtggagttgctaatgaaacatggaaggtgcttgagagctaactggaagggagggaaggtgtgcattcctgcaccagggcctttgcatgtacttgttactttctcctgctggccagctggagtgtctggaaagatctgccttactcagggaagccttctcactcgcactctgcccagttaggaccactgccctctagagaccctatagaattacagaggaggccgggcgtgatagctcacacctggaatcccagcactccagcctgggcgacagagtgagactccatctcaaaaaaaaaaaagaaaaaagaataaaccccacacacctttgccttccctttgctttccctcaccacacccccattctccccgcctcccagcccctggcaaccactaatctgcctcctgtctgcgtggatttgcctgtcctggacatttcctataaatggatcatacaatctgtggtccttttgtttggcctctttctgttggaataatcttttccagggacatccatgttgtagcatgtgtcagaatttcctttctttttatagctgaataatatcccattgtatggactgaccatgtttagttggcccatccatccgcagatggacgtttggattgtttccacctttgggctattgtgaataatgctgctgtgaacgtttgtttacaggttttcaatgcaggcaaatgttttcgtttttcctgggcataaattccaggagtggaatcgctgggtcatatggtaactctctttaaccgtttgaggaaccgtcagactgttctccatggtggctgtgccatttgacattcccacaagcagtggaaatgggttctggatttctcatcctcaccaacttttttgattccagccatcctagtgggtgtgagatggtgtctcattgtggttaggatttgcatttccctgatgatgttttcttctaatttccctgatgactagagatgttttcatgtaagttatttatttatttatttatttttgagacagtgtctctgtctgtatcccaggctggagtatagtggcgcaatcacagctcactgcagccttgacctgggctcaacaacagatccaccccccaccacaccctccctagtagctgggaccacaggtgtgctccaccatgccggggtaatttttgtatttttcgtaagaggcagggtttcaccatgctgcccaggctggtctcaatctcctaggctcaagtgatccacacgccttgccctcccaaagtgctgggattacaggcatgagccactgcacccagcctcatgcaatttctttttccttttttttttttgagacagtcttactctatgccccaggctgaagtgcagtgccacaatctcggctcactgcaacctctgtctcctgggttcaagtaattatctggcttcagcctccctagtagctgggactacatacccacaccaccttacctggctaatttttgtatttttggtagacagggttttgccacgttggccaagctggtctcgaactcctggcctcaagtgatccgcctgcctcagcctcccaaagtgctgagattacatgagtgagccactgcgcctgacctcatgtaatttcttgagtggtcatttagtcattatacaaacagtgattgaagggcatgtgcccagcactgcagactctgctgcacagtcagatgaccctgcctttctggcatttccatgccagtaccctgaagagataccatatatgtacctggtgcttgcaatagctggcactcagaggtagcacactgtgtcctagccactcttccgagcacttaagcatattcagttactcttcaagtacatatgaataagtatgcctttgccccctcctctttgcaagggatagcgtgtggccaccctggtctgcagctagcttagcagatttgaccacatattgtaaaagtgagtctgtaccaggacagatagggtagagggctctgtgtggtttagcaccatggtagattccatcgtgcggatgtccctccagcaggggaggtctttggggccagggctaggccagcacccacatttgccgcctgaccccgtccctccgtctctgtctctccattcctccctgcccctcgtgcagccgctgccatggcccagacactgcagatggagatcccgaacttcggcaacagcatcctggagtgcctcaatgaacagcggctgcagggcctgtactgtgacgtgtcagtggtggtcaagggccatgccttcaaggcccaccgggccgtgcttgctgccagcagctcctacttccgggacctgttcaacaacagccgcagcgccgtggtggagctgccggcggctgtgcagccccagtctttccagcagatcctcagcttctgctacacgggccggctgagcatgaacgtgggcgaccagttcctgctcatgtacacggctggcttcctgcagatccaggagatcatggagaagggcaccgagttcttcctcaaggtgagctccccgagctgcgactcccagggcctgcatgcggaggaggccccatcgtcggagccccagagccccgtggcgcagacatcgggctggccagcctgtagcaccccgctgcccctcgtgtcgcgggtgaagacggagcagcaggagtcggactccgtgcagtgcatgcccgtggccaagcggctgtgggacagtggccagaaggaggctgggggcggcggcaatggcagccgcaagatggccaagttctccacgccggacctggctgccaaccggcctcaccagcccccgccaccccaacaggctccggtggtggcagcagcccagcccgccgtggctgcgggagcagggcagccagccggtggggtggcagcagcagggggtgtggtgagtgggcccagcacgtcggagcggaccagcccaggcacctcaagcgcctacaccagcgacagccctggctcctaccacaatgaggaggacgaggaggaggatggtggcgaggagggcatggatgagcagtaccggcagatctgcaacatgtacaccatgtacagcatgatgaacgtcggccagacaggtgaggtgccgtcctgtcccccatcccaccagccacccctgctcctcctgccactcgcgtgccactctctccctgcagccgagaaggtggaggccctcccggagcaggtagcccccgagtcccgaaatcgcatccgggttcggcaagacctggcgtctctcccggctgaacttatcaaccagattgggaaccgctgccaccccaagctctacgacgagggcgacccctctgagaagctggagctggtgacaggtgggccggtctcgccccagatctctcccctccgcagctttggagccggctggcctgggctgggctgggcagctggttaggagcccccagcacctcagtttccctatctgtgctgtagtgttggtaacagccaccctaagggtgggggcgttggtgagatggaggagctgatacagcaaggcctggcctctaggtttctggcttaaggggtcggggcgagcattggctattattgtttggccgcatgggtagattagctacttcccgggctcctgtgaaggccagctactacctaggttaggaatttggacagtcacaggggcgaatgcctgtagtcctagctactcaggaggctgaggtgggaggatcccttgagcccaggaggtcaaggctgcagtgagctgtggtggccactgcactccagcctgggtgacagagtgagacttcatctcttaaaaaaagaagaagaagactgtgtttggtccttgggtcagagtgcctaggtgtgagcctccactccctgttggtcctgctgagcttgggctcatctctagctggtgacagccagcgtgcccacctcacacaggcttgcggcacgactggccacacagcaggcaccccgaggatggtgaagcaaccctttctgtcctttcctgagcactgatgaggttgggggagccccaaggagcctcccctgactgcccttggtgggtagagatgtaggggagaaggtccctgggtgagttttcttgggacccagagcccagcagggagggcctggggtgttctgagatgaggcctggtatcatgggggctgtggcggtttgggggcaccccaggccatcctccggcttcctctcaccaggcaccaacgtgtacatcacaagggcgcagctgatgaactgccacgtcagcgcaggcacgcggcacaaggtcctactgcggcggctcctggcctccttctttgaccggtaaggcccttgccagagccccagggaggggggtggggtttccccatgtcccccccaccaccaacttgagcgctgactccctccatgtcccctgcccccaggaacacgctggccaacagctgcggcaccggcatccgctcttctaccaacgatccccgtcggaagcccctggacagccgcgtgctccacgctgtcaagtgtgagtgttggcccagctggacgaggcgtgggcccggggcacgcaggttgacgttttttcccagccttggctctcagagagggctagagttcagtgttgagaagcattctggggctcattctagccttgctgggaaaccggctgtgattgcttagagatttcttcgtgtttgggggatgcacgtgccgaagggaagccagggagcctgtgtcaggcaggagggtctcgaactcagggcagtctgggagggatgaggcagccagacagtgctagccactcgtcatggggggcatctagattttcaagtgaccactccccgttactaaattctggcaaatgatccgaatttttcaagaacacggggccatcccatcaaaaccaacacatccccacacatggctgaactcagtccggtgtagggttgggtgcacgtagtgtggtgtcctggccgcgtggcctcactcgtttcccctttgagagggagtcgcagatgctgtaggggagctggtgagtaggccttgtgggagtcacctggcccccgtgccaaggccgcacccaccctgccccacagactactgccagaacttcgcccccaacttcaaggagagcgagatgaatgccatcgcggccgacatgtgcaccaacgcccgccgcgtcgtgcgcaagagctggatgcccaaggtcaaggtgctcaaggctgaggatgacgcctacaccaccttcatcagtgaaacgggcaagatcgagccggacatgatgggtgtggagcatggcttcgagaccgccagccacgagggcgaggcgggtccctcggctgaagccctgcagtaacccgcccagcctcccgcggggccacacacttcccctcccaacacacacacacacctgccatcttggtcatgagctactgtctgtccctccccaggacccgcggtgggtgctgcatgttcccggccctctgcccctcctgtcctaccccctttccccaccgagagctgggccgggagaggaccgcagggcaggtggcgtgaggtccgtgttgccttctttaacacacactcgtgcagtgggggagttctggctccccaacctaacccctagccgtcatctccacactcaccaggcccaccaggggagggggctggcctgggggtcttgggaaggcccctccccaggccctaggccacctcgcggaagccttcagcctccgcccctcactgcagccccttgggacttgaggggggccccaggggttctcaggacccctcccaccacctcccagtgcttccacgtctccaaaagcgccttcctgtcaccctcgtctatccctgcgcctgggggctggggtaggcgaggccgtggggactacccattttatagctggggaaacaggctccgagaaattgcacaaccgacctcaggtggccggcagtggcgtgcctggtgccctttctcctcttccgcctctgttgctccctttggtcctctggggcctcagagaggcaggtcctaaaggagggggggtctcctgggggcagaccgagggtctcggaggatagaatgagaggtttccagggctggcagagtgtgtgcgtgtgtgtgtgcagaagttttgctttcaaacaaatgaagatacaagaggcagtaggacctgggttggaacccaggggagcagactggggggctgttgcccctccctccatctccccacacccaccccaccccacagcagggctcctggcccccacccccctgtacataatttttaaaacctttttttagcgaatgaaatattgaagtataagattccttttatttttcaaaccaatggggctgtgtctattgtccccctcggtccccaggggtggggggccttggaaggcagggcggtgttggggggctggggggcaggctgaatgtgtgtgtgtgggtgtgtatgtgtggagtgtgtgtgtgtgtttccatggtaggactccagtcccagctgctgcctaggctcctgtgggtcctgtgggtccccctcccctgttcaccttccccaacagggctatagtttaagggtgtcccaggccttggctggttggctgggcccagctcctgggggctgggcagggcagggcagggccgggtccacttccattgttagcagttgtttgcagaattttctcttttaccattcctctctttttgttctcgcccagagtgggtggttttttgttgttgttttagattttcatgtgaaggcagttttttttcttttttaactccccatccccctatgcagggtgtcatttcaccatccacatccacatccttgtttgtgtttctggccctcgtcctccctgcctctcatctgcctccccaacccccacctacccactgctcccaggggtctctccaggggcagggggattttaggagatggggtgggggccagcccctactggacccttgtaatctgatttggagaccatccccccgatgggaccagcagccccgccggcccactgggggtccctcttaacatctgcttgttgcgggggtcagtcatgagtgccagggtctggctggggtcttggcactgtcttcctggccggggcctgaaaccttagcccccagccggcctgagtgggggatattgacacccccagctaaagcacaagcaccttagtcacccctcctctccccccgcctcctggcctgccaccccaccccagcgtttaccccaaagcacaatgccctggtcacttggcaagcggctgggcctgacggaggccgaggggcagaccggggctccagccagacccctgaaaggaaggtgctcccccacttccaggccttagttggggtgggggggccagctcctgggcctggggtcttctcacccccacccccttgtcctgggtaggcccctgcctgcccctctctgccttttcctcgggtgtccctcctcgagcccctgtggcattggcttgggtggcagagcccacttgtttcagggaccccaggaggtgccccctggctcccaggactgtgtgtgggtccggggggtgggggggtggggagaagggtcgggcagggggtgcaggggaggaaactcctcaccaggagagccaaagacagggttgtgccttaccccaggagccacccctgtaccccccttgccctgccattcaccctccacccctacccctgggcggcctgctgctttttccttctcttcctcccctgccctgagctgcatggttcccccaccctgggcagccaggaaggaatctgaatggagaatcaccaaccaccagagaaaaaagactgtggggccctcccctgccaactccccttccctggccgcccactcaacccacacctctttcacgcaggacaggctgcccaccctgtccacgtgaagtgccaacgccctccccaccctgggccgagcccccacccctccctgggcccccaagtgagattgcacatttaactactgtaaggagaggagcggcgttggcaaatgtgaaccatgagaatatcagtgatactgatgagaataaactaaacgcctttgtaacagccttgccgcatgctcgttacttgggggcccagggaggaacacacacctgcattgtgcccagcagacccaggttgctgactgcaaactgacagcctccgattctaacacgcatgcaagttaccccaacagatacagataacgcaacatatgagctggtcctacacacacacacacacacacaatttttttttctttttttttttttgagatggaatttcactctgtcgcccaggctagagtggcgcgatctcggctcactgcaacctctgcttcctgggttcaagccattctgccttagcccccccaaatagtggggattgcaggcacccaccaccatgcccggctaatttttgtatttttagtagagacagggtttcaccatgttggtcaggctgggctcgaactcctgacctcaggtgatccacccgccttggcctccccaagtgctgggattacaggtgtgagccaccgcgcccagcattttcttttcttttttttttttgagtcggagtttcgctcttgttgccaggctgtagtgtcatggcgcgatctcggctcactgcaaccaccgcctcccaggttcaaatgattgtcctgcctcagcctcctgtgtagctgggattacaggcatgcaccaccaggttcagctaattttatatttttagtagagatggggtttctccatgttggtcaggctggtctcccaaagtgctgggattacaggcatgagccaccaccacacccagcctgaaaaaatacttttaattagctgggtgtggtggcatgcacctgtactcccagctactctggaggctgaggcaggagaatcacttcaactgggaaggtcaaggctgcagtgagctatgatggcaccactgcactccagcatgggcaagagtcagatcccatctcaataaaaaaaaaaaagggagctgtggctctgtcaattttacagcaacactggctcactcggtgcccgcctgtgccgtggctgatatgccaagccccagaaacacatcccatacacacacactccacgccgcattcagaagagcattcatgcattaaaagaacataaaagagatcggcagggcgcagtggctcatgcctgtaatcccagcacttcgggaggctgaggcagatggatcacctgaggtcaggagttcgagaccagcctggtcaacatggcaaaaccccatctttactaaaaatagaaaagttagctgggcgtggtggagtgcgcctgtaatctcagctacccaggaggctgaggcaggagaattgcttgaacctggaaggcggaggttgcagtgagccaagatcgcaccattgcactccagcctaggtgacgagcaaaacttagtctcaaaaaaaaaaaaaaaaaaacgagatcacaaaatttaaccgatattggaaatatctgggtgaacaagagggtcccaagaatatgaaaggacaaatggttctatcaagtaggaaaaaccatggatgcaccgtgggtccccatagactcaaagataacacaagattaaagtaactgggctgggcacggtggctcatgcctgtaatcccagcattttgggaggccgaggcaggtggatcacctgagatcaggagttcaagaccagcctggccaacatggcaaaaccacgtctctattaaaaatacaaaaattatctgggtgtggtggcgggtgcctgtaatcccagctactcaggaggctgagacaggaaaatcacttgaatgcgggaggtggaggttgcagtgagacgagattgcgtcactgcactccagcctgggtgatagagcaagactctatctcaaaataaataaataataacatagaagccagtcatgatggctcacacctgtaattccattactttggaaggctgagagaggaggatcagtggagcccaggagtttgagaccagcctgggcaatatagggagaccctgtctctacaaaaatgaaatagccaggcgaggtggcatgtgcctgtggtcccagctacttgggagactgaggtggaaggctgccttgagcccaggagttccaggctgcagtgagccatcattatgccactgcactccaacctgggagacagagtgagagagaccctgtctcaaacaaacaaacccaaaataggccaggcacagtgactcatgcctgtaatcccagcactttgggaggctgaaataggcggatcatttgaggtcaggagttcaaattcaagaccagcccggccaacatggcaaaaccacatctctactacaaataaaaaattagttgggtgtggtggagcattcctgtaatcacagctattcaggaggctgaggcatgagaaccgcttcaacccaggaagcagaggttgcagtgagccgagatcacgccattgcactccagcctgggcgacagagcgagactctgtctcaaaaaaatataaataaaaataaaaagatcaagagaacctaaaccattaaaaaaaagactcgcatgggtgcggtggctcctgcctgtaatcccagcactttgggaggctgaggcaggcaaatcacttgaggtcaggagtttgagaccaacctggccaacatgaggaatcccatctgtactaaaaatacaaaaattagctgggtgtggtgacacacacctgtaatccaagctacttgggaggctgaggcagaattgctggaaaccaggaggtggaggttgcagtgagcagagattgcaccactgtactccagcctgggtgacaagagtgaaactctgtctcaaaaaaaaaaaaagaaatccggaacacgcacatgtgcacacacacactggagcacttgtgcaagcagtggcttagaatgggagtcccaatcagggctcggtcacgcatttgcagtcaacacacaccacacgacacaaatacgtataaaaaaggctgacattttatttccaggttggcacgtgtataaggcacaggggcaaatggctttggggtcctggaactggaaatggagacaggtgtgtctcaggtgtccctgcctccaccaccccctaagtgcacttgagacaggaccagtggtggtggttccagcccagggtcctgaagggtcccactggctctaggggagagccatggggacagctccccaggcgggaccctctactctccagctacccaggagggaccctctcctcctagggggcgaggccagctccaaagtgcttggtggctccccaggcttaagggaccagcctgccagggagggctggggtcagagagagaatagtaagatgagaacgaggagaagcacccccactagcacggcgatggcacaccactgtcggcggtctgggaacgagaaggtcaggggtcacggggagagggtaccacctacaacctgcccccaccaggactgacccctcccctgaggggactcaccactcgtcatgtgggatactttggccaacttcctgaggaccccgtccatgcgggactgggtgtggtccatctcttgggcgaaggcatccagcatgctgccaagaacaggatggcatcagccccagatggcccagacacaccagggtggccgagagcccctggcccacccccagggtcctggcctcacatgccctgctcgtccagctcttctccaacgcggccggacatgtgcttcagaacctggatgctcccagacaccatctccagctgttgatcctgttcatccatgatcagctgcagagcgaaggggtgggagatgctgttgaaaacgaccccagaaggccaggcgctatggcttatgactgtaatcccagcactctgggaggccgagacaggcggatcacttgaggccaggagttcgagaccagcctggccaacatggtgaaaccccatctctactaaaaatataaaaattggccaggcattgtggtgggcgcctgtaatcccagctactagggaggctgaggcaggagaatcactggaacctgggaggcggaggttgcagtgagctgagatcgcgccactgcactccagcctgggcgacaaagcgaaactccatatcaacaacaacaacaacaaaaagggaccccagacctcagatcagtctgcaaggctctcccctcccaagatccaccccgctggccccaaaacctgctgtgtggcctgctgctcctcgatgtagcgagatgtggccgagactgcgctggcatccagcaggtcgctgggtgacttctgggcagctggcttgcctgcgagtatctgcaggggcacacaacataggctcagggagagaccccaactcacagcggggcctgtggggcaaatccccacggtggtaagtcaggggggcagactctggggcaggacagcctgcattccccactcaccacttactagcaaggtgacccagagaccccatcatttggcttccttgtgcctcagtttcctcatctgtaaaatgcagagagcaggatggggcatggtagctcatgcttgtaatcccagcactctgggaggtggaggtgggcagataacttgaggtcaggagctcgagaccagcctggccaacatggtgaaaccccatctctactaaaaatacaaaaattgggccgggcacagtggctcacacctgtaatcccagcactttgggaggccgaggtagatggatcacgaggtcaagagtttgagagcagcctggccaacatggtgaaatcccgtctctactaaaaatacaaaaattagccaggcttggtggcgggtgcctgtaatcccagctactagggaggctgaggcaggtcagaatcacttgaacctgggaggctgaggttgcagtgagccgagatcacaccactgcactccagcctgggtgacaggttaagaccttctctcaaaaaaaaaaaaaaaaaaaaaaattaccgggtgtggcagtgcatgcctgtaatcccagctacttgtgaggctaaggcagcagaatcgcttgaacctggggggcggtggttgcagtgagctgagatcgcaccactgcatttccagcctgggtgtcagagtgaccttgcctcaaaaaaaaaaaaaataaaataaaatgggaagagctagaatccgtgtttcctgggttgaaatgaggatttaaagaattaattgatgggggacacttacagcagtgcccaacacatagtaatgctagtaaatgtcacattttactatttgtttatttttggggggattttagctgggattacaggcacctgccaccacatccagctaatttttgtatttttactagtgatagggtttccccatgttggccaggctggtctcgaactcctgacctcaagtgatccacctgcctcagcctcccaaagtgctgggattacaggcgtgagctaccatgcctggcccaacagatgtttgtttgtttgtctgagacagagtcttgctctgtcacctaggctggagtgcagtggtgtgatctcgcctcactgcaacctccacctcccgggttcaagcaattctcctgcctcagcttcccaagtatctgagattacaggtgatcaccaccacgcctggctaatttttgtattttttgtagagacagggtttcatcatgttggccaggctggtctcgaacgcctgacctcaggtgatccacttgcctgggcctcccaaagtgctgagattttaggtgtgagccaccgtgcccggctccaacagatgtattttagagtttggacttgaattcccccaaggcagcacatctggaaggcacgtgggcactgctatgggatgacaaactgggaggagcctcagtcccccaccctccccgaccccacgtacgcttatgagggagagagaaaggctggtggttctcaacatatgaaaaatatcaacagagaacaccaagagaaaaagtggactgacagaggtggttgggagaaacacagaaacacacacacacacacacacacacacacacacacggcaggcacattacagaggaaactagcagatattaggatatgaggggggaaaatgcagatacactcagaggccaagtgcacgcacccaaataggttaggtgcatgcacagatgaaaaggcgggggcggatcacctgaggtagggagtttgagaccagcctggccaacatggggaaaccctgtctctactaaaaacacaaaaattagctgggcatggtggcacactcctgttgtcccagctacccaggaggctgaggcaggagaattgcttgaacccggaaggtggaggtttcagtgagtcaagattgcaccactgcaccccagcctgggcaacatgccaagactccatctcaaaaaaaaaaaaggaagctggccgggcgcggtggctcacgcctgtaatctcagcattttgggaggctgaagctagtggatcacaaggtcaggagatcaagaccatcctggccaacatgatgaaactccgtctctactaaaaatacaaaaattggccgggcgtggtggctcacacctgtaatcccagcactttgggaggccgaggcaggtggatcacgaggtcaagagttcaagaccagcctggccaagatgttgaagccccgtctctactagaaatacaaaatttagccacgcatggtggtgggtgcctgtaatcccagctactcgggaggctgagacagaattgcttgaacccgggaggcggaggctgcagtgagccgagatcacgtcactgcactccagcctgggcgacagagcaacactccgtctcaaaaaaaaaaaaaaaaaaaaaaattagccgggtgtggtggcatgtgcctgtattacagctactcaggaggctgaggctggagaatcgttgagcccaggaggcggaggttgcagtgagccgagactgcgccactgcactccagcctggcaacagagtgagactgcatctcaaaaaaaaaaaaaaaaaaaaaaaaaaggaagttatgtgcgatggctcacgcctgtaatcccagcactttggaaggctgaggcaggcagatcagttgatgtgaggggtttgagaccagactgaccaacatgacaaaaccctattaaaaatacaaaaattaggccaggcgcagtggctcatgcctgtaattccagcactttgggaggctgaggcaggtggatcacctgaggttgggagttcaagatcagcctgaccaacatggagaaaccccgtctctactaaaaatacaaaattagccaggcatggtggcgtatgcctataatcccagctactcgggaggctgaggcaggagaattgtttgaacccaggaggcggagattgcggtgagccgagattgcaccattgcactccagcctgggcaacaagagtgaaactccatctcaaaaaaaaaaaaaaaaaaatacagaagttaccctggcatggtgacgagcacctgtaatcccagctacttgggaggctgaggcaggagaatcgcttgaacccaggaggcagaggttgcagtgagctgagatcaagccactgcactccagcctgggcaacagaacaagactctgtctcaaagaaaaaaaaaagagtaaaaggcaggcatgcgtcctggaaacaggtgcacacaggacaaatggcatggaagcagaaaggagataggtacacaggcccccagccctctcctgcaacaggaaaccagtatagacccagaggacacagtagagaggaacccacggacatatacacatagagaggttcaggtgcacacaccgagaaagtgcaggcaggtagacagcaagaagataactgcccacagagaggacgggcactgtcgcaaaagggacaggtgaacacgcacagagggatctggcttggttacccccaggggctcaggtgggcagggtgggtcaggaaggcttacctctctgttattcctctccaaaaatgctacggctgttgggctgaccatatggtccttcatttcctggaggtaaggacagcattagggaggaaagacactcaggctgggcgcggtggctcacgcctgtaatcctagcactttgagagaccaagccgggtggatcacctgaggtcaggagttcgagaccagcctgatcaacatggtgaaaccccgtctctactaaaaacacaaaacttagccgggtatcgtggcaggcacctgtagtcccagctactcaggagactgagacacaagaatcgcttgagcctgggaggcggaggttgcagtgagccgagattgcaacactgtactccagcctgggcgacagagcgaggctctgtctcaaaaaaaaaaaaaaaaaagaaagaaagaaagaaaaaaaaacacactcaaaccttcccccactccccgcctgcaggacctttcctgacctggactgcctctcgcatccgctccacgaacacctttctctcctgcaggtccccggctgggagcttgaacttgcctgggttggcttccactatacgtgggctgagagtcaagggtcaaggccggagccagatatcatccccgtccctaggggtccagccctacccgaaggtgggctgccaccgcaatgggctctcccatgccaccctctgccacaaagccccaggatatcgatggtctcttccaggtcctcgaggtcccactcgatgctgcgcaggccattccgcagctcattggtcgtccagtccagctcctcgcgtccgaccgccgcgctttcctgcaggagctcgcaccagcgctggtacagcccgcgggccgtgttcaccgccttctgcacctcgctgcgggcaggggcacggcgggcgcggctgggggcaggcggtcctcccgcctgcctctgcccccgactgcaaacccaaacgcatgggggactccggagacccctatatacccctgcgtgcgcctcccactctgcaccccgacggccttgcccagcccgccgggcacgctggggccggcacccgggcactggctggcttgggtacagagcaccctccgccctcccccgtcgttgtcactcaccctcggactacaaaaaaggggtcttcgagagacatgtcagtcccttcccccccaggccgaacccccctcccggcctgggttcgcgggctggttccctcccaaccgaggagaacgcgccgccacccccgcccccgtcacgccaccatcgagagccggaccgccaggggagaaagagaagcctcggaggcccgacgtgcggacacttccgccctctcctcagccatcttggttgtgggcagaggcagcttccggtgcacatgcccccgccccttagccctctcgtgccgcaccgtagggggcggtgtcggagttctgtctgggcctattcgggtccgagttcggaatttcggttcaaggcccagttcctcggattgttcctgcgcaacttcagtttcccttccaggcacgggcaatgtaaataatgatagcctccctcatctctggcggctgggtattatggctggggaaggggctcattcgattcgttgaagcttttcatggactccctgagctggcacctgggagatcgtcccatcccagggtcccgagtgtcaggtttggctagggtctgggggagaggtggtcctcccttctccctgcgggggcgcggtgaggagcgggcctgctcctccggggagttctgccgcattctcccaatctctttcctgagaagtggcggagttgggggcacttcgaggtcgccttggggcgaggtggtcgtgagggggtcccagatatgccagcagcggggggaggtcacctttgagaaagtgcgtggaggtgggtttcttcagaagcgcggagtctttctgggtgcgagcctgggggtagcgggtggtggctttgaggatggtctccaggggggccctctgtgtgtggggtctccgtctgggtaggggccaggaatatcagcggagggactcagggtcgtccctatgtgtgacagtggcgctgtgtgttggggagcttcgggaaagcactttttttgagtgatagggggcctggtctcccctggagggtgggcgggttatctgagggagtcctcggagggtcgcccccttgcgcgtcagagttgctgcgtggggtctcagagatagcgcctgggctggggaaatcattgtggggtctccgtggtaaggttagcggggtggggacggcctgcgtcttcggcaggtcgtcgcagtctggcaccatcgttgaatggggacgagtttgggaagggtattttaggggggaataacttttgagttcccagcgtgcgggggaagggcgggacgggagggtgtcccaaggcctgagaagatcagtgtggggcaggggtcaggaataacctgggagggggccttgtatgggggaaataattgggaagaggagagatgggatgaagggggcctcagcgggtcgtctcctgtgtatgcagggtcgttctgcagcgtctctgggagatggcgtccctgggagccctcaggtcgcccctacccgctgcggggtgctttcctggcgtcacgccttcctggcccctggagggaaggaagtgaaactctcctcttcccccacccggctggaatgcgagtcaggaagcctggggctccagcctgctccggctgcccgggtcggggatggggaggggcgtggccggagcgcaaagccccgcccctccgcgccccccccccggaagccccgccgccggccgctaaggcgatcacgggccctgtcctaatatgggcaaccggaagcggcccgcgcgactgccctacgtcactccgtccaaatttagttgtggaagtcagcgggcgctggtggcgggaaggcgccgcgagccagtgcgggcggaaagggggcggggggcgcaccaccccttaaagggcccgcaccaggaatgaatggagccattcgaacaattctgcatcctatttttggaggaagtggaattagtatttcttggagagacggcgcgtagcggagggtagggcggagattttctatctgctctgtctctgcattgctgggtttccagctcccaacctaaccccgcctccccgaacgcggagacggaactcggcccccttgtttggggggcggcagccacgtgttcacggggactgtcgtgcgcgccgggttcgcagccgtgcgagctctgaacccacccgtggagctcctgtcgcgggaaactgcgggggaatggcttggtacgaatcacgggaacccgtagcccggggcgggtcaccgcctacaagcaagggctggcgtacgctagagaccgaagagctggaggccccagtggccccctttcacagcagtagcaaatattgtttgtttagtaaatattggcctagtgactctgccttggtttccccacttgaaggaagcagatagaacagtatcctccgaggagtggaggctggggatcggtgaattattgataaaaggagagctcttaacctagcctggcacgttgtaagcgctgttagcatgattattggtgcagaaaacactcattagacacacctggtaaatgctaagaacagtggccacaggggatgttcaggctggaaccagggtcttcccctgtgtgaagggaaacttgctgcccacgacccactggggcctccagacgggagcatgtgggtaggccgtgagctccacccccggcccccctcccttgggccaaggcgctgatgcatcggcggggctcagagaaaggagcccacccagaaagctcagcgtggagtcgggggacgctcctcctcgccagggttcccgtcccctttccctgctgggtaaatcgcattctgtctctttaaggagtgtttggccgcgacgagttggaaagcccggatgcgtccttcggttgggcggggtgtctcagtgacgtcactgggggtataaaagggcctgggtggcgggcgcctgggcagagcgtcctagcagtgtcactgcgtgggttggtttgtgtagagaggcgtgagcgagcccgttgtccggagtgcacctgctgcctgttctgtccctcccgggagcccccgccgctgtcgccgtcgagtcgccatggaagtgcagaaagaggcacagcgcatcatgaccctgtcggtgtggaagatgtatcactcccgcatgcagcgcggtggcctgcggctgcaccggagtctgcagctgtcgctggtcatgcgcagcgcccgggagctctacctctcggccaaggtggaggccctcgagcccgaggtgtcgttgccggccgccctcccctctgaccctcgcctgcacccgccccgagaagccgagtccacggccgagacagcgacccccgacggtgagcacccgtttccggagccaatggacacgcaggaggcgccgacagccgaggagacctccgcctgctgtgccccgcgccccgccaaagtcagccgcaaacgacgcagcagcagcctgagcgacggcggggacgctggactggtcccgagcaagaaagcccgtctggaagaaaaggaagaagaggagggagcgtcatccgaagtcgccgatcgcctgcagccccctccggcgcaagcggagggcgcctttcccaacctggcccgcgtcctgcagaggcgcttctccggcctcctgaactgcagccccgcggcccctccgacggcgccgcccgcgtgcgaggcaaagcccgcttgccgcccggcggacagcatgctcaacgtgctcgtgcgggccgtggtggccttctgaggaccccgagcggcgctgccggagcccagagcgcgcgtcgaaccgtcggcccgagggcgcagacctgaggcgaggccacccccctccatcctgggggaagcgcccgcgaaaaccgtggagagaagccgccgcccgggctgctgagaggcccggagagggactctgtccccggggagccatcgccttcagtgtgcagggacggcaccgaggagtctgagccgggggcgcgggcgccttccgcagagacctgcgcccacaggtgctgtcttagtggactgggacgtgaacctttcgctctccttctggactgggagaagggaggcttgggtgttgtgttttttgttttgtttgtttgtttgtttttaaagatctcctcagggtcggacttcattttgtactgtgggctgtgctggccctttcaaggtttttcaagagttggttttgcgtttccaacctcggagaattccaggcactccccttccccctccgctgacatacttgtataagcggtcatcgttgcgtcatggggcaggcgtggggagcttcctgtcgccttgcgtgggtgtggggcctgggaggaggtcctggggcgtgcacccgccctgggcagtggggaggagagtggcctgagttacttcacccccgcgtgctgctggttaatgtcccgcgtctctgcaccttcgggtgggagcggggactgatctactttcacattctcaagtttttctcatctgcattagaggtgcccagtaggttcccaggttccagcgtgcccctccctcagacacacggacacaatcagccgagaagttcctggtctgaatcacgagaatgtggaggggtggggggtgtcagtggaaaggcataaggctgagctgagaccagttgctggtgaaactgggccaatctggggaggggaacatccttgccagggagtttctgagggtctgctttgtttacctttcgtgcggtggattctttttaactccgtctacctggcgttttgttagaaatgtcagataggaaaataaaaaccatttgagtaaaaaagccggtgctgtctggttttctgctgtggtgggggaggggcggggttaaagcgtcaggggctggcagccgctcgctggggccccaagaaccggtctgaccggttaccacgtgggcgagagagggttgggcccccttttccttgcccgggcattccctaactggtggagccccgcctcccccagatttgggggttcccttgaaattgtcctacaactccgggacagggagatcggggctttctgagttgagacaatagtgctaaacacactgccccaagcggagctggggatcgattgcacgcactttgaagccttgaaaggtggtagatctcgcccccaccccctagaccaaactgaatcagctgtggccggggccctacagtatcaggtggagctgagcgggtgagctttgaagggctctttagtccccagttcccgtatcttcctcgaggaatcgttgtgtgtctcaggcagggacgtgcagcctcagtttcctcatctgtgaaatgggcctctaagcagcttctccacccggcattaggtttttaaaaatgcccattagagccctagttattttcttgggtcactccccagctctagaataaccaccccgaaacgagaaagccctttcaatataccccacgtaggtttaagagtggggttgtgggcgttgccccagggcgaagggagggggcctgtcgggaagacaaaggagtcgcaggtgcggggagtggtggcggcggcaggcgccgggaaagcgctcgccccgccccgccgacggctggctctgccgccgcaggcttcccatgaccccaggggaactgaccccgtggccacagggtagaaggaggggcaagccggcctcagaacgtctgctggtggaatctgggagctttggctcccctcccgcccaacccacaccccctttcctctcctgtgtggattgtgaaggagagcttctcaccgttctccagccaagctcgcccccacggctgcctgattccttcctgggaacacgtggggggacttttaaaaggcgccacctactccgagtcctgacccacccaactctcccaggggacgtgggggcactggagccccacaccgcaggcggtagctcaatgcacccgcgtcggagttcctcccccgcgagcgtggcaaggctcagggaagtcccgggcccctggggagggggccttgccgcgcatcctgtcgcaggaaccgccgggcccttccttccgcgggaagcggcttggccgacccccgcccccgcccgggcctcttgggggtttccggtgcccggccaccgtggggctggggactgaaagtgatgggactgaagatggggctggaacaaacacactacagacacatccccttaagacacacccatccccaagaccccactggacccatcagaaaaggcagcattgaaccttgtcacagcaaataacattggtgaggcctggactaattgattggacaatggctgtgaaaactaaaaaggtcacccatcctgtgaccagcaggttccagcagggaaccccaagcctgctgcaggagactccagaaaggtgtttgctgctggcttgtactaaattggcacaaactgcaaacagcacagcctacatgcccatcctcccagatgggtcctccccagaggataaaaggccggagccagacagaactacacacacaggccacacagataattcggtaccagaaacatgatgctgagtgacaaaggccagctgcagaagtcaggtaagaagcacatattctgggccgggcatggtggctcatgcctgtaatcccagcactttggaaggctgaggtgggcagctcacctgaggtcaggagttcgagaccagcctgatcaacatggtgaaaccccatctctactaaaaatacaaaaattagctaggcaaggtggcaggcgcctgtaatcccagctatccgaaggctgaggcaggagaatcacttgaactcaggaggcagaggttgcagtgagccgagatggtgtcactgcactccagcctgggctacagaggaagactctgtctcaaaaaaagaagaagaagaagaagaagaagaacatattctggagggagggaaacaaccaggtctactttcgttttcttgctatgcatccttgagtgagtcacttgacctctctgggcctgtttccccaaccgtatactggggacaataatagtccctgccttttaggtttgttgtaaggattgagattacacatgtaatccttacaacaaacctagcagagtgctggcacgtagaaaatgctaaatgtgctgggtgccatggttcatgcctgtaaccccaaaaatttaggaggctgaggtgggaggatcacttgaggccaagagttttcagtgcaatcatggctcagtgtagccatgtagcctcgaactcccagactcaagcaatcctcctacctcagcctcccaagcaggttggaccacaggctcaggcaccatgcacagctaatttcttttttttttctttctttctctttttctttcttttctttcttccttccttctttcctttttctttctttcttttctttccctccctccttcccttcctttcttcctttctttcctttctttctttcaactagagtctctctatcacccaggctggagtgcagtggcttgattacagttcactgcagcctcgagctcctgggctcaggcaatcctcccacctcagcctctggagtagctgggactacgccaccacacccagctaatttttcttttttttcttcttctctctcttttcttccttgtctctttcttttcttttcttttttgtttttgacagagtctcgctctgttgccaggctggaatacagtggtgcaatctcggctcactgcaaccctggcctcccggattcaagcagttcccctgcctcagcctccgaagtagctgggactacaggcgcacaccacgacacctggctaattttttttttcccaccggttgtcaaatgaccctttattgaaatatttttctttgtgcttcttaactagctgggcatttcacagcaccactgtgggtttttctggttttttggggtttttttttttgagtcggagtcttgctctgtcgctcaggctggagttcagtggcgcgatctcggctcactgcaagttccacctcccaggttcacgccattctcctgcctcagcctcctgagtagctgggactacaggcgcctgccaccacgcccggctaatttttttgtattgtatttttagtagagacggggtttcaccttgttagcaaggatggtcttgatctcctgacctcgtgatctgcctgcctcggcctcccaaagggctgggattacaggcgtgagccaccgcgcccagccatcaccactgttgatgtcatctatgatgtcacgagggtggcggccatcaacattacggcctacagactgggcagtccccaggatctctttgatggttccagagagttctctggctaaagatcggtgccacatctgtcgagtaatgttgacgatctcatcaaaagtgatattcccattgtgtctaatgtttttctgtttctttctgtctcttggtggttccttgagggctttaatgatcagggcagaggcagaaggcaccacctcaatctgggcctgtctgttctgaatggtcagtttcactgtaatcctcaggcccttccagtcaccccattgccttggcaaggtcattaccaagcttttttggagacagacccagggggccgatcttgggggctagtgcagaagtggcacccccttcaccccgagtgcacctcaggtatacaaatttgatctcgttggggttgaactttggcagcatggtggaggtgattggttttggaaaaacctggattctggacaaccgaagaaagctgcaccttgggctcctccaagccgaaagcccagctaattttttttttctttttgacacgaagtcttgctctgtcaaccaggctgcagtgcagtggtgcaatcttggctcactgcaacctccacctcctgggttcaagcaattctcctgcctcagcttcctgagtagctaggattacaggcacccgccaccatgcctggctaatttttgtatttttagtaaagacgaggtttcaccatgttggccaggctagtttcaaactcctgacctcaggtgatccacccacctcggcctcccaaagtgctgggattacaggaatgagccaccgcacctggccgaaattttttgtattttagtagagacggggttttaccatgttggccaagatggtctccatctcgacctcgtgatccgcccgcctcagcctcccaaagtgttgggattataggcatgagccaccgcgcctggctctttcttttctaacagggtcttgctctattgcctaggctggagtgcagtggcacgatcttggctcactgcaatatcttcctaacaggttcacgagattctcccacctcagcctcctgagtagctgggattgcaggtgcacaccactgcgcctggctaatttttatattttttgcagacacagggtttcaccatgttgcccaggctggtctggaactcctgagctcaagtgatctgcctgcctcagcctcccaaagtgctgggattacaggcgtgagccactgcacctggacgtatttattttttacttaggatttgtgccctaactcagaagttaattctgttaattctaccaatgtccagcctgagcctgaatgagtgaatgaggttgttttgggtaaacaggtgttacatgcttaatgtttatcatctcattaaatcagtggcttctacatgactcttagaatttctcaaacctcagatggttgaggggtcaggatatttgtgatattttcataactactgtactattattattatcatttatagacagggtcttgctatgttgcccaggctggagaacagcagcgccatcatagctcactgcagcctccactgcctaggctcaagcagtcctcccacctcagcctctgcaggagctgggaccgcaggcctgtgacaccatgcccagctaactgtattcatgtaatagttttctttgcgttaacccacttattaatcactctccctatttagaaagtaacagttttttaaaaggttacaatgaaaataaaacaatgtcaaaagatcctgctgaaacagtaacaggtttaatagtttcaaagagagattagccagccttaacgacacattgtttccaagggaagaaaactatgcttgggctgagaagggggatgcaagttgacaagggagaaatttggagagatccagtccacgttatttaaataacattgaattgggctgggcgaagtggctcacgcctgtaatctcagcactttgggaggccgaggtgggcggatcacctgaggtcaggagtttgaggccagcctagccaacatggtgaaacatcacctctaataaaaatccaaaaattagccgggcatggtggtgagtgcctgtagtcccagcgacttgggaggctgaggcaggagaattgcttgagcccgggaggcagaggatgcagtgagtcaagatcacaccacggcactccagcctgggcaacagagtgagactgtctcaaaaaaataaataaataaataaataaccttgaattattttgccacactgtcccagaatatggaaaattctgcttctggaagagggacaaactcctatgatgatctgcaaggccctgcttgatctggggccatcccatctctggatgaatcatgcatcaccctctggccacatggacctgctttttgttcctcatacttccacagccttctcagccacatggcctttggatatgccgtgacctcctgaagatctttcagcttccttgctcacctagtgaagccagctcagctcaaggggcaaatcctcagggaagtgttccctgtctaaccctcttttggcctaaggactgctttattttattttttatttttattttttgagatggagtctctctctgtcacccaggctggagtgcagtggtgcgatctcagctcactgcaacctccacctcccgggttcaagtgattctcctgcctcagcctcccgagtagctgggattacaagctcccaccatcacacctagctaatttttgtatttttagtagaaatggggtttcaccatgttgtccaggatggtctcgatctcctgatccgcccgcctcagcctcccaaagtgctgagattacaagcatgagccaccgtacctggcctattttattttattttaattaattaatctatttttgagacagggtcttgctttgtcgcccagactggagtgtagtggcatgatccaaggctcactgcagcctcaaagtctagtgcttaagggatcctcccatctcagcttccagcatagctgagaccccaggcacacaccacgatgcctggctaattttttattttttttgtagagatggaatttccatgttgcccaggctggtgttttttatttatttatttaaccagtctctgatgggaggcaagacccctatatttgacactcggatcaagagctactttatttaaaacatttggccaggcatggtggctcacgcctgtaatgccaacactttgggagaccgaggcaggaggatcacgaggtcaggagttcaagaccaacttggccaataaggtgaaaccccatctctactaaaaatacaaaaattagccaggcatggtaacacgcgcctgtagtcccagctactccagaggctgaggcaggagaatcgctggaaccttggaggagaaggtttcagtgagccgagatggcaccactgcactccagctgggcgacagagtaagactctgtctcaagaaaaataaagagaccaggcgcagtggctcacacctgtaatcccagcactttgggaagccaaggtgggcggatcacaagttcaggagctcgagaccagcctggccaatatggtgaaacctcatctctactaaaaatacaaaaattagccgggcgtggtggcaggagcctgtatcccacctcttgggaggctgaggcaggagaatcgcttgaacccgggaggcggaggttgcagtgagccaaggtcaagccacttcactttagcctgggcgacagagcaagacttcatctcaaaaaataataataaaataaatttttgcggggctgggagtggtggttcatgcctgtaatcccagcatttttggaggctgaggtgggcggatcacttgaggtcaggagtttgagaccagcctggccaacatagtgaaaccccatctctactaaaaatacaaaaattagccaggcgtggtggcgcgcacctgtagttccagctgctcggaagggtgagatgggagaatcgtttgaacccggggccggggggctgaggttgcagtgagctgagatagcgccaatgcactccagcctgggtgacagtgagactcagtctcaaaaaaaaaaaaatttttttttgttaatacttatcacaagtgcaattttacctttgtagaattaaaccgttgtttctgagttagtttcctcttgtagcctactgcctccaagtctagcagatggttaagcggtttttgtgaatgaatgatgcctttgcaaccttcgtttgagatctgtcctcttaacgtccactgtgtatatatgaggaaacaggcccacagagtttcgctctgcaagacagcaagtaaaggacagctctagtcgggtcctctatcccgaagcctcctccccactctgccctgccctgccgtgcaggacccaaaggaagggcgccccagttcagcctctgtagatctgggaaagggccgggccacaggtcgggaccaatccagaagcagcacccagaccggtttacccggttccaggaccttgggcgaagtccacccgcccgagggcagggacgacgcaggccacgccgcggcccagttgctagccaggcagggtggggatttgatcttgccaaggaaatgtgagcgggaggccgagcgttggaggtgggtaagtcgtcactatgcagggcggagccatcctgtgtctatcacgcccaagggcggtgcatgcaaattgactcccgcatttggcttttccccgggctccgtctccgcgcgctgcaacccgcgacttccaagaactccccgcgtagtcagctgcccgggccacgccccctttccggacccgccctgcccgccccagggaggcgggggcggagcttgcggcccagcgggaaggcggaggcgggggtcgcgcccaggtcccgggggcgtcagaggcaatgggaagtcgtggcttctgcaccgcccttgggggttcggctcccaatcagggaaaaagggccgagagaatgaaagagtaatgagacttgcgagtttgaggctcacactactctctttgggttgggggttgctgaagcctccacgtgtattcagggagccccgaacctcacacctctgtccaggggagctcagaacccgccgtgttctggaaagcctacaccttccccggttttttagtgtctaggggagcccacaaccctcacagccgtgtctagtagcgctcagatccacacacctgtgtttgggggagcccagatcttctctacctgtgtccagatgagttcagagccccgacgtttgtccaggaaagcccacctctgtccagaagcgctctgaccaggacctttcctgtttcctgaggctcagcctagggggtcatcccacccaggtctgtgttaaggggagcttgtgtctccccaaacatgtccaagtgagctgagctcaggagctgaggcctccccatatcgtgctccccgcctggccctttggtgaatccctttctcagaagaaaccctcaggggccctagccctgctgcccttccctgcactgtcttcgagcctcctggcccaattggcccctcccccagtacactgttgagtcttagttaagacataatcccagcattcactgtcccccatcccccagctctcccgcacctcggcggctggccgggcccccgggagtgccgtcatcccagccggctggccacccgactggcaccaattaatttcctcctcggcctgtccacccagggcctcggcctgtctggttgccagctgctcaccctcagccagcccgccccctcgggctcccagggaattgccaacagttctcctccttcctgcaacccccccacccccaatccaggccaccccacccagcacagttaatcagaaaaagctgacagttaggacctggaggagtgatctgaaatcagatggaggaggggtgggatgttaaactttcggacccagggatgcttggggtggagcgggggcatggctggagggaggcagaggatccagttttacttaagaaccccaaatcaaaggcttgtagcttccagatggggactgcagggagggctgaccccctcccgcatacaccaggcgggcaaggtggagcgcccctcctcggaaattgccccccgcccaagatgcgtcagtgacagctgtgcctcctcagcccgcacccagccggtttccttttcctgtgcacactctcccgatgggctggccttcagcctggagagactccacggccccttggaaggggctccccagagggtcttcctggacgagggggaggggacaggctgaagaacaatggggcttctgtggctgcaggacgccaggcacttcctgttaaccctttcctcggggtgcagctgcagggagcacctcccaggtcccgccttgtgggaaggggcagaggcagcctgaggggaaatcttgttgcgggaattaactgttgtgttaattgaggcttttgtgagtgtacttaggaggggtgaggtgaatcacaccttttctcacttgatggagttacagggctttctcctctattgctgagggctgtgcagtcagggacggggcagggctagcctgggagaagcctgtgcactgagctcagagacgttcaaggcttttccccagataggttacaccaggatctccagggcatggacagggatggggtcggggaacccaggcatcctaggtgaatccaaggaacagccatgtctgcaaaccactgttctagctgccttgctgggcttacctaggggccacgatccctgagtcagttcccttggcagcctgggtctcagtttcccttggcttgtagaagttctttcaggggcctaccaagaggacacggcagtctaggagctccctaaggggcaggagtgggctgggagccttggaaacggtttgtttctcctgggagccctgagaagtcatgttgggggaattaactgctgtgttaattgaggcttcaagccaagtcccctctgtttacacagagagtctgagaaatgccctcggaagattccgagagcctccaaaggccccagagactttgcttctgccctggaggcttctggttttttacgggtaagataacctctcccatagtcaagagagagacttactgatgcttatggcagccccaggccctgaaggtatgctgtacttggtcacttccgtgcatttgtttaatcctcaccacaagcctgggtcaggataaaaagtaggcacttcactctttttttttttaggggtcttgctatgttgcccaggatggtctttaactcctgggctcaagtgatcctcctgccttcggccttccaaagtgctgaggttacaggaatgagccaccgtgcccagcccagccctaaagtaggcctttttttccccccgcgacggagtttcactcttgttgcccaggctggagtgcaatggcacggtctcagctcaccgcaacctccgtctctgggttcaagtgattctcttgcctcagcctcctgagcagctgggattacaggcatgggcaccatgcccggctaattttatatttttagtagagaggtggggtttcgccatgtgggtctcgaactcccaacctcaggtgatccgcccgccttggcctcccaaagttctgggattacaggtgtgagccaccgcgctcggccttttttttttttttccttctgaagtggagtcttgttctgttgcccaggctggagtgcagtgacgcgatatcagctcattgaaccctctgcctcccaggttcaagcaattctcctgcctcagcttcccaagtagatgggattacaggcatgcaccgccacgcccagctaatttttgtatttttagcagagatggggattcaccatgttggccaggctggtcttggaactcctgacctcaggtgatctgcctgcctcagcctcccaaagtgctgagattacaggtgtgagccactgtgccccaccaggtaggcactttcattagccccattttacagatgagggaactgaggggaactgaggcacagagtggttaaacaaagtgtccagggttaccctgtccagtaaagcaaagcccattgacattcttcctctcctggatttttttttttttttgagatggagtcttgctctgtcgcccaggtgggagtgcaatggcccaatcttggctcactgaaagctctgcctcccaggttcaagcaattctcctgcctcagcttcctgagtagctgggattacaggcgtgcaccaccgtgcccagctaatttttgtattttttttttttttaagtagagacggggtttcaccatgttggtcaggctggtctcgaactcctgacctcgtgatctgcccgcctcggcctcccaaagtgctgggattacaggtgtgagccaccacgcccggccggatttttcttcttttcttttcttttcggtggggaggaggagagtgtgaggacctttgtcctggttggtgaacttttgcttaaacccagcttctatctctggttctcagataaggaaccagctccttctgggagctgagagccgcaccccaggtctccttgccactcctgggctacctgttttctctttcctcatatccagggctgatcactcaccaggttccctcttagaatcatttgccacttcacttcattttcctctcttctcccctttctgcaggatgaacacttccccaggggtcaatctgtgcacgctcagtccaggggctgggtaaagacaaagttttttgtttgctgttgttcacttgtttatttaaatttatttattttgagatggagtctcgttctgtcacccaggctggagtgcaaggcgcgatctcggctcactgcaacctccgcctcccgggttcaagcaattctctgcctcagcctcctgaggagctgggattacaggtgtgcaccaccatgcccggctaatttttgtatttttagtagagatgtggtttcaccatcttggccaggctgatcttgaacttctgacttcgtgatccacctgtctcagcctcccaaagtgctgggattacaggcgtgagccactgcgccccaccctcacttgtttatttacttgttttgtaaacattatttactgagcatgatcaaactgctagactggagaggctgctgcaatctcctccctctgcccccgccatttcctggtacccatccttgctggtggtgtctgcaatcagcggggccctggctgagttcacgggaaaggaaatggctcattgcttcagcctttagaccggggggcagggagggcctgtcgggaggccgcctagtcaggggcgtgtcagaggccagaggggccggggcccagcagctggggcttggtaagctctggagcctgggctccaggccagctcgctgccaacctccacctgagaccaccccacccccaacccccttccttctctcccctgctgccgaggcgcgcccttccggagtgaaactttggtttctcacgacccggaaggcttgaagcaaacctgcaattactcactgcctggtctgtgcgggctgcagctctcagactcaggatgaggtggcggtaggtggggtggggctcttgggacccttttaccccttcgtgctgctggctgggggaggccactaaagtctgcgcgctgccttccacgcgttctccagacactttccaaatccctgcggacactaccttataaacagatactggaattttcaaagtactgtcatgctgtttgggaccagaaattccctcccatgagggttggatatgaagccagtttggagggggaagctgagggtgcatgcccctggatctaccaaagccttctcttcagtctgggaggttttttttctttttctttttcttttttgagacagagtctcactctgtcgcccaggctggagtgcagtggtgtgatctcagctcactacaacctccacctcccaggttcgaatgattctcctgcctcagcctcccgagtagctggacgacaggcgtgcgccaccacacctggctactttttgtatttttagtagagacagggtttcaccatgggtttcagagggtgcagtggctcacgcctgtaatctcaacactttgggaggtcgaggcaggtggatcacttgaggtcaggagttcgagaccagcctggacaacatggtgaaaccctgactctactagaaatacaaaaattagctggtggtggtggcatgcacctgtagccccagctactcaggaggctgactcaggataatcaggaacccgggaggaggaggtttcattgctccagactttgagactccatctgaaaaaaaaaaaaaaattaagccaggcaaagtggctgatgcctgtaattccaaagctttgagtggctgaggtgggatgatcacttgaggctaggagttcgagaccaacctatgcaacatggcaagaccaccacacccccatctctgcaaaaaattagccaggtgtggtggcgcacacctgtagtcccagctactctagaggctgaggcgggagggtggcttgagcccaggagtttgaggctgcagtgagctatgatcatgtcactgcactccagcctgggtaacaaagcaaggcccagtctcaagaaaatcagttatttttgcatatgtatggcgtacataagaacatttgttacatgtctataatgtaacctctctctgctttgctttgcagctctggcaggggcagggcagcagtgctatgatgaggccacttgtaattgggggtgttcatgggagggcctttgttctctgagcactgagtgggcactgctgtatctccatatgcctgggatcctcattggttcccctcctttctcccaggcttgtgcctctttcttttacttgactttttttttttttccacccaggctgccgtatagtggtgccatctcagttcactgcaacctccacctcccaggttcaagcaattctcctgcctcagcctccccagtacctgggactacaggcatgtgccaccatgcctggccgatttttgtatttttagtagagacagggtttcaccatgttggccaggctgatctcaaactcctggcctcaagttatccattagcctcagcctctgaaaatgctgggattacaggcgtgagcccggcctttcttctttttcttttttcttttgtttgtttttttagagacagggtctcactctgtcacccaggttgcaatgtagtggcatgatcatagctcactgcagccctgaactcctgtgctcaagtgatcttcccacctcagcctcccaagtagctgggactataggtgtacatcaccatgcctggctaattttttaattttttttgcagatatggggtcttgctatgttgctgaggctggtctccaattcctgatttcaagtgagcctcctgcctctgcctcccaaagtactgtgatgagctactacgcctggtcattgtccctctttctcatgactctctggacatccctggggtggagggtggggcaggcacacacatccctcaacttcccagtggttccacgatgactaagccagccctgtccctgaggctgggagtctggagctaggatccacccccatggcctcatatcccaaccttgagcctgggtttctggtcagactggacgggctagctcggtctccttaactctcagagttgccttgtccaggcccagcgggtcccacacagccaggcacaccccaccccacagggctcctgggaaattctctgccccaccctcaggctgcctcagacagactgaggttacctgtgattgtcccagataacccgagtgagcccatcctctgctctgggtggctccctccctggcagctgacctgtaaattttgaaaagatggggacaatgctcagctaggagggatgctcctgctgtcttccctgctggcctggccactccccagactggacaggtcccttggcagctcttcccagcaacccaggcagccccaagccccctcttgcttggtgttccaggccagtgagaatctcacttcttctccaaaactttgtcttccaactcctgttttgttgtgttttgtttttttattgaaacagggtctcattctgttacccaggctggagctcatggcatgatcatagctcactgcagcctcaaactcctaggctcaagcaattcttcccacctcaccctcctgagtagcagggactacagatgtgggccaccatggtcagctaatttaaaaagtttttttcttaggccaggcatggtggctcacgcctgtaatcccagcactttgggaggccgaggcaggtggataacaaggtcaggagttcgagaccagcctggccaacctggtgaaacccctgtctctactaaaaatacaaaaattagccgggcgtggtgacaggcacctgtagtcccagctgcttgggaggctgaggcagagaattgcttgaacccgggagatggaggttgcagtgagctgagaacactccactgcactttagcctgggcgacagagtgagactctgtctcaagaaaaaaaaaattatatatatataaattagccaggcatgatggtgagtgcctgtaattccagctccttgggaggctgaggtgggagaatcacttgaacctgggaggcagagattgcagtgagccaagattgctccactgcacaccagcctaggtaatagagtgaaactccatctcaaaaaagaatttttttttttcagagatggggatctctctgtgttgcccaggctggcctcaagcaatcctcctgcctcagcctcccaaagtgttgggatgacaggcatgagccactgcgcccggcctgtggtttctccatgtggggccagatcactctttgtgcagggagctaccctgtgcatctttgatgttgagtagtagccctggcctcaaccctgtgccaatgaaagatgtctccagatgttgccaaatgttggggtggggtggggcgcagccttgccgcctgcttcacctgttctacctgtccatactcataccaacctgcaaagtaacttagaccgtgtgttttctttttctttttttttttctgagatgaggtcttgctttctcccaggctaaagtgcagtggcacgatctcagctcactacaacctctgcctcccaggttcaagcgattctcctgcctcagcctctcgagtagctgggattacaggcacccgccaccatgcgcagctaatttttttattttgagtagagatgggatttcaccatgttggccaggctggcggctcgaactcctgacctgacctcaggtgatccacccgtctcggcctcccaaagtgctggattacaggtgtgagccaccgtgcccagctggagcatatgtgttctttttttttctttctttctttctttctttttctttttttttttgagacggagtcttgctctgtcacccaggctggagtacagtggcgccatctcggctcactgcaagctccgcctcctgggttcatgccattctcctgcctcagcctcccaagtagctgggactacatacaggtgcccgccaccacacccggctaatttttttgtatttttagtagagacagggtttcaccatgttagccaggatggtctcgatctcttgacctctagatctgcccgcctcggcctccaaaagtgctgggattacaggcatgagccactgcgcctggccaggagcatgtgttttctcatcttgggcctggatcgagtccttatggtggaggtgatctgcgggttccagaatcttgggaagggattggtgagaccatagcatggcccattgcaccgtccctctacctggagtgaggggtgccagcctcccatttcctggtgggtgggcttgctggatggcagcctgaggtgggtggagtcaggctgccttgttctatttcctggttcccagggttgggtggtggcaatggtggccccggagccagagggcttggggtaccctgatcctgcctccggatttactgggtgggtgctagggtgtgtgctccaagaccgatggcccctgtgggcgtggaggagaaaccagagactcaagcagatctccctgcctgccttctgccctcatgtcccacttcaccttggctctaggccaggggctgccagaatggtgactcagagcgactgagaagaggagagaaacagaatggaggtccttatcatcctccaatctccgccatcccagcatccccataaaggtcaggacccttgaggccacatgtcaagaccatccacactgccctctcctgcttcctcctcctctacccgccctctttcagtgggatttttttttccgggtaccacgctagggcaggaaggcagaagtgagcatggggcgtggaacgtctctgaggttggaatatatttaggccaggagaagagtgtgtgtgtggtgctggccaggccctggcgccggctcggcgggcttgaggagtgatggtggggggccctgagccagtgtggggatgctcctgccttctccctttttttttttttttttttttggttttgagatgtagtctcgctctgttgcccaggctggagtgcagtggtgcggtcttggctcactgcaacctctgcctctttggttcaagtgattctcttgcctcagcctctggagtagctgagattacaggcatctgccaccacgcccggctaattttttctatttttagtagagatgaggtttcaccatgttggccaggctggtctccaactcctgacctcatgatccgcctgcctcggcctcccaaagtgctgcgattataggtgtgagccaccgtgcctggccaccttctcccttttaaagacagcctgtcagctttggggaggaggagtgggaatcactaggcccccaccaaggctgaggcaggccctgtgtgggccagatacatttagcatcttcaaaacaaaccagcaagactaacatcaggatcacttacagctgtaaacacaaggcccagagaggttaagtggctttcccaaggctgttcaggaaagaggtgatgatggaagggttctcttgctggcccggctggctgccaccattcatgcacgcagtgttcattcatgcaacacctttgtgggtacagcctagcctgtgccagcccccaacaacgtgcgggagaacaagaagccaactggacccaggtcggcaaaccgcagcccataggtggcattcgtctgttgtctctgcacggcccttgggctaagaatggtttttacatttttaagtggttgaaaacaaaagaataagagtattccatgatacataacaattatatgaaattgcaattccagccttcatgaattcagggtacacaggttacacccatttgagtccacattgtctgtggttgccttttcgtgactgtggcagagtggagctgttttgacagagaccctgcaaagctaaacaactttcctatttgtcccctcctcccctgtccccctcacacttttttttgacagagttttgctcttgttgcccaggccggagtgcaacagcgcaatcttgggtcactgcaacctccacctcgttggttcaagcgattctcctgcctcagcctcctgagtagctgagattacaggcgcctgcaactatgcccggctaatttttatattttaagtagagacaggatttcaccatgttggccaggctggaccggaactctgacctgaggtaattcagccgcctcggcctcccaaagtgctaggattacaggcgtgagccaccacacctggctttttttttctctctctctcttttttgagatggtgtctcactctgtcgcccaggctggagtgcagtggcgtgatttcggctcactgcaacctctgcctcccgggttcaagcgattctcctgcctcagcctcctgcaacctctgcctcccgggttcaagcgattctcctgcctcagcctcctgagtagctggaattacaggcgcgtgccaccatgtctggctaattttttgtatttttagtagagacgaggtttcgccatgttggtcaggctggtctggaactcctgacctcaagtgatcagcccgttttggcttcccaaagtgctggaattacaggccagagccaccacgcctggccatgcccggctaatttttttgtttgtttgtttgaggtagagtttcactcttgttgcccaggctggagtgcagtggcatgatctcggctcactgcaacctccacctcccaggttcaagtgattctcctgcctcagtctccctagtagctgggattacaggcgtccgccaccacgcccggctaatttttttgtatttttagtagagacgggggttcactatattggccaggctggtcggcaactcctgaccacaggtgatccacccgcctcagcctcccaaagtgctgggattacaggcgtgagccaccttgcccagccggagcatgtgttttctttcctttttttttttttttaagagacggagtcttgctctgtcacccaggctggagtgcggtggtgggatctcggctcactgcaacctctgcctcctgggttcaagcaattctcctccctcagccttgtgagtagctgggattacagacgtgcaccactatgcccggctaattttttttgttttttgtattttagtagatacggggtttcaccgtattgcccagggtagtcttgaactcctgaactcaggcaatcctcccgcctcagcctcccaaagtgctaggattacaggtgtgagccatcacgcctggcataaaataataataataataataataataataataataataataataaaattggctgggcttgatggctcattcctgtaatcccagcactttgggaggttgaggcaggcggatcatgaggtcaggagtttgagaccagcctggctaacatggtgaaacctcatctctactaaaaatacaaaaattagccaggcatggtggtgggcacctgttaattccagctactggggaggctgaggcaggagaatcgcttgaacccgagggctggaggttgcagtgatctgagatcgcaccactgcactccagcctcagcgacagagcaagactctgtgtcaacattgttttttttaggccaggggcagtacctatttccagcactttgggaggcccaggcatgaggatcgcttgagcccaggaatttgagaccagccagggcaacatggagaaaccctgtctctagaaaatatacaaaaaattagctgggtgtggtggcatgtgcctgtggtcccagctacttgggaggctgaggtgggaggatatgccaagtccaggaggtcaaggctgcagtgagctgtgatcacaccactgcactccagcctgggtgacagaagaagaccttgcctcaaaaaaaaaaaaaaagttttttattattatttttttttctttttgagacagagtctcgctctgtcgcccaggctggagggcagtggcacaatctcagctcagtgcaagctccgcctcccaggttcacaccattctcctgcctcagcctcctgagtagctgggactacaggcgcccgccaccacgcctagctaatttttttgtatttttggtacagacagggtttcaccgtgttagccagaatggtctcaatctcttttcaccttgtgatccgtccgccttggcctcccaaactgctgagattacaggcatgagccaccatgcccagccttaatttttaaagataggggtctcactatgttgcccgtttatctgagctcaagcggtcctccagtgttagcctcccaagtagctggactcaggtttttattttaacaatgtaagactatattatccttataagaatactttaaaaaaaatggataatcctcccagactccctgatatgggagttgaaggggcagatgtggggcggagggagaggggagctggtgttggaaccaggctggtttgctaaatccagcctgccacctgtttctgcacagcctgcgagttaagaatggctttttcatttttaaatggttgggaaaaaagaatcaaaagggaaatttcacgacatggggaaaagtatatgcaattcaaattttagtgtccataaataaagttttattggcatggagccgggctcattcatttaccctgtatccgtggctgcttttacgcttcaccgcagaattgagtcattcaacagactgtctggccctcgaagctgaaaatatttactgtctggcccattggagaagaagcttgtagacccctcttctaaggggcctgagaccctcacttcaatctgtccctgattcaggccgtcccaggatcatttcttcattggcatggaaaagacgttggtgtgatttggaggcaggaggactcgctgaggactgatccttaacactggatgccccctggggaggaggggcattggggtcttcaaggtgaagcaggattgaggactgaggtgggcaggctggctatgggcacggcaggagcaaaggccaggaggccagacctgtgcctcaactcaagctgccccgctcagttcgagtccaacttcggcaacatagcaaaaccccgcctgtacaaaaaaattagccataggccgggcgcggtggctcatgcctgtaatcccagcactttgggaggccgaggcaggtggatcgcgaggtcaggagatcgagaccatcctggctaacacagtgaaaccccgtctctactaaaaatacaaaaaaaattagctgggcatggtggcgggcgcctgtagtcccagctactcgggaggctgaggcaggagaatggcgtgaacctgggaggcagagctggcagtgagccgagattgcgccatgacactccagcctgggcaacagagcgagactcagtttcaagaaaaaaaaaaaaaaattagctgtgcatggtggcacgtgcctgtagtcccagctactcgggaagctgaggtgggaggaattgtttgagaccaggagttccaggctgcagtgagccatgattgcaccactgccctccagcctgggcaacagagtgagaccttgtctcttaaaaaaattaaaaaaaaaaagctgggcgcggtggctcacacctgtaatcccagcactttgggaggctgaggcaggcagatcacctgaggtcaggagttcaagaccagcctggctaacttggcaaaaccctgtctctactaaaaatacaaaaatttgctgggcatggtggtgcatgtctataatcctagttacttgggaggctgaggcacgaaaatcacttgaactcaggaggtggaggttgcagtgagccaagatcatgccattgcactccagcctgggtgacagagggagactctgtctcaaaaaataaataaataaataaataaataaataaataaataattataaataaataaaaggaaagaaagagagacagagagagaaaataaaaaagaaagaggcggggcgcggtggctcacacctgtaatcctagcactttgggaggttgaggcgggtggatcacttgaggccaggagttcaagaccagtctggccaacatggtgaaaccacatctttactaaaaataccaaaaaaattagccgtgtgtggtggcacgcacctgtagtctcagctacttgggagactgaggcaggagactcacttgaacccaggaggtggaggttgcagtgagccgagatcgcgccactgcactccagcttgggggacagaacgagactgtctcaaaaaagaaaaaagagagagaaagaaagaaaaaaaataagcaagcaagctcccccccatcccatctcctagtggatgggacagatctattccatgggtcacctccccctaaccggtcccccaggcccatctgctgtctctgcatttctctgctcctgtccaccatcactgtttgcaccaggctccatctctttcattgtcttgggtctggagatgtaccctgagctcccttagttggtcccccacctctcttatctccttttctcagcatgaccagtgcacttttctttcttttctttttgttttttttttgtttattttttgagacggagtctcgctgtgttgcccaggctggagtgcagtggcgtgatctccactcactgcaagctctgcgtcctgggttcaagtgattctcctgcctcagccttccgagtagctgggatacaggctcctgccaccacgcccggctaatttttgtagttttagtagagacaaggtttcgctatattggccaggctggtctcgaactcctgaccttgtgatccgcccactttggcctcccaaagtgctgggatttcaggggtgagccaccgtgcctggccttttttttttttttttttttttttgagaccgagtctcactctgtcaccaggctggagttcagtggcacaatcttggctcactgcaaactctgactcccggattcaagcgattctcctgcctcagcctcccaagtagctgggactacaaggcgcccaccatcacgcccggctattttttgggttttgccatgttggccaggctggtctcgaactcctgactgcaggtgatccacctgcctcggcctcccaaagtgctgggattacaggcgtgagccactgtgcttggccttttttttttttactttaaaaaaaaccttttttcctcattccatgcttcatttcaaaattaaccattttaaagagaacatttcggtgacatttcgaacatccacattgttgtgcagccgtcgccaccatccatctccagaacgctttcatcttggaaaactgaaacactgtcctcattaaatactcactccccattccccctcccagcagcccctggcacccacccatctactttctgtctctgtggatttgactattctgaacatttcatatcaatggaataatctactgtgtggccttttgtgtctggcttctttcactcagcatgatttttaaaaatttttatttttagaaacagtctcactctgttgcctgggctggggtgcagtggtgtgaaaatagctcactgcagcctcaacctcctgggctcaagcaatcctcctgcctcagcctcctgagtagctgggactataggtgtgtaccacaatgcctggctaataaaacctttttttttttttttttggttggatgcggtggctcacgcctgtaatcccagcactttgggaggccgaggtgggcggatcacgaggtcaggatatcgagaccatgctggctaacacggtgaaaccccgtctctactaaaaatacaaaaaaattagccaggcgtggtggcgggcacctgtagtcccagctacttgggaggctgagccaggaaaatggcatgaaccgggaggcagagcttgcagtgagccgagattgtgccactgcactccagcctgggcaacagagcaagactgtgtctcaaaaaaaaccacagggtcttgctttgttgcccaggctggtgttgaactggcttcaagccatgctcctacctggacttctcaaagtgctgggattacaggcatgagccactgcgcccagcctgccatcatgggttttttttgttgttgttttttttggtgggggggtgggtggtggttaatgcatgttgcagcatggatcagtgctttattattattattatatatttttatgagacagagttttgctctatttcccaggctggagtgcagtgatgctatctcagctcactgcaacctctgcctcccgggttcaagcgatgtttgagcctcagcctcccgagtagctgggtgtggaggcacctatcaccatgcctggctaatttttgtatttttagtagagatggggtttccccatgttggccaggctggtctcgaactcccgacctcaggtgatctacccgcctcggcatccgaaagtgctgggattacaggcgtgagccaccttgcctggcccagaatactttcatcatcccaaactgaaactcaacctctgttaaacatcaaatcaatattctctgcacacccccagccccttctactgttctacttcctgtctctaagccagtgagctttcctttttttttttgggacacagtctcgctctgtcatccaggctggagtgcagtggtgtgatctcggctcaatccagcctctgcttctcgggttcaagagattctcctgcctcagcctcctgagcagctgggattacaggcccctaccaccatgcctggctcatttttgtatttttagtagagatggggtttcaccatgctggccaggctggtctcaaactcctgacctcaggtgatctgcccgcctcggcctcccaaagtgctgggattacagatgtgagccaccacgcctggcctctttttggtttgttgatgtaggctgggctgattgatcctcccccatctgatggtgagcccttgagggctggaacaggatccttcttcctcagcactgtgcactcccagctcccaggcctgtgcttgatcctcagctgatgctcaaaatacagttgaaggaacggcagaaaattccaaatgggtgggcaaaggatgcagtccgctgctggggaggatagatgggctgaggcaggagatgaatgcctcgtggctctgggtgggtgtagggagctcttgggctgcaggtggggttgggtgcatgagccgagatctcagggggctggctgagtaggggctgcagacactgagagagaagaagaagggtctttggaggcagagaagtgggcacagagagatgggctccccaggcagaagtgtagccatgtggccaggagaaggtgggacggagggacgggaggtgtggaggctccatggtcacattcttggccgtcctgcatgtgcgttcaaagcctgggaagggcccggtgcggtggctcatgcctgtaatcccagcactttcagaggccgaggcgggcagatcacctgaggtcaggggttcaagacaagcctggccaacacggtgaaaccctgtatctactaaaagtacaaaaattagctgggcgtggtggcaggtgcctgtaatcccagctactcaggaggctgaggcaggagaatcgcttgaacccagaaggcggaggttgcagtgagctgagatggcaccactgtctgtctgggagacagaacgagacttaaaaaataataataataaaaataaaaagtaacaaagcctgggaaggcctggggaagggggctctcaatcccagcactttgggaggccaaggcaggagggtcgcttgatcccaggaggtcaaggctgcagctgcagtgagctatgatcgtgccactgctttccagcctgggtgacagagcaagaccctgtctgcaaaaaaaaaaaaaaaaaaaaaaaaaagtccagaaaggccggtcttgggctgagtcctgccagggcctggtagccagggcctaacagtgtccttgtgtccttgctaggaggtgaattcctagtgtaggcttgacccactttagctagggaagccacaggatttaccatttccaggggccagctctgcctgaggagagaggccttcctcataaagtcaggcttggcttcctcccagctggctggcctccttctccctgattctaaatgcgggcttgtcaccgtgtgtctgcatgtaggcgcacgagcgcacatctgtgtgtgggggggtgtttgtggtgctgtgggcagcgtgggggtggcatgtgttagcaagctgggggccatttctaccccacggttctttttatatctcacatttacagaaagcctggacctctgagcctgggcctgtcagtgggctgtttgaggctttgaaggaagggaccaagaggcggaggcgtctgaaaccccggcgccgagggaggatagtcgggtcaggggtggctgttagcttccttccattggcactgacggcatgcagcccggggccatagccctgcagtgtcaggtgttgcagagctatattttaagacactggcaccatggttcacacctatattctcaacactgaggttggaggaagctgaggttggaaggctgaggtgggagggtcactggagctcagggattcaagaccagcctaggcaacatagtgagaccccatctttacatatatatatatatatatagcgattatgtgtatatatatatgtatagcgattatatatatatagcgattatatatatacatattttttctcctgcttcagtctcctgagtagctgggattacaggcttgtgccaccacgcccagctaattttgtatttttagtagagatgaggtttcaccatgttggtcaggctagtcttgaactcctgacctcaggtgatctgcccccctcggcctcacaaggtgctgggattacaagcgggaggcactgtgcccagccctacaaatatatatatattttacttagctgggtgcagtggctgatacctgtagtcccagctacttgggaggctggggagggaggattgcttgagcccagaagatcgaagttgcagtgagctatgctcgtgccactgcactagcctgggtgacagagagatcctgactaaaaaataaataaataggccgggcgcggtggctcacgcctgtaatctcagcactttgggaggccgaggcagatggatcacgaggtcaggagatcgagaccatcctggctaacacggtgaaaccccatctctactaaaaatacaaaaaattagccaggtgtggtggcgggcgcctgtagtcccagctactcgggaggctgaggcaggagaatggcatgaacctgggaggcggagcttgcagtgagccgagatcgcaccactgcactccaggctgggcgatggagcgagactccatctcaaaaaataaattaaataaataaataaataaagccgggcatggtggctcacacttgtaatctcagcactttgggaggctgaggtgggcagatcacttgaggtcaggagttcgagaccagcctggccaacatggtgaaacccccgtctctactaaaaatacaaaaattagccgggcatgatgttgggaggtccctgtaatcccagctactcaggaggctaaggcaggagaatcgctggaacctgggaggcagaggttgcagtgagccaagatcccgccactacactctagcctgggcaacagagctagactccatcttaaaacaaatcaaagtaaatataataaataaagcatactctctccacctccactgctgggtcctcaccaggatgaatggttcagagcaaggcctgaaggggtcctccctgagatgctgggagcgtctccctgagaagccctgttgggctggtcccagtggaccctgggtgctcgctgcctaagctgccctcccccatccctgcccagctctgcaccccatgagaagccctgtgggtggcccccaactcaggagttcccacagggagctgagggccggtgatagccccccaggcttatgcagtgacctcgcttaacagctggtaactcctgcaggattctgaggcacccgcctcctcccagagggacacattcatggccttttcctatttatttatttattagagatggggtcttgctctgtctcccaggctggagtccagtggcatgactattgctcaatgcagcctcaaactcctgggctcaagcaatcctcccacttcagcctctagagcagctgggactatgggcatgcaccatgctgggctaatttatttttatgtgtattattgtattaattttttttttttcgacggaggtttgctcttgttgcccaggctggagtgcaatggcacaacctcggcttaccgcaacctccctcttccgggttcaagcaattctcctgcctcagcctccggagtagctgggattacaggcaccccccaccatgcccggctaattgttttttttatttttctagagacagggtttcaccacgttgttggccagactggtcttgaactcccgacctcaggtgatctgcccgcctcaacctctcaaagtgctaggattacaggcgtgagccactgctcccggcctcgtattaattttatttttaaaaataaacacactgcaggcctggcgtggtggctcacgcctgtaatcccagcactttgggaggccgaggtgggcggattatgaggtcaggatatagagaccaccctggctaacatggtgaagccccgtctctactaaaaatacaaaaaattagccgggcgtggtggcgggagcctgtagtcccagctactcaggaggctgaggcaagagaatggcgtgaacccgggaggcggagcctgcagtgtgccaagatcacgccactgcactctagcctgggcaacagagcgagactctatatcaaaaaaataaataaataaaagtaaataaaaataaaataaacacactgtagccttgaaatcctgggctcaagcaattctgactctgcctctcaaaacaatgggactgcagaggtgagccactgtgtccagctaaaaaaatatatatatatgtatatatgtgtatatatatgtatatacatgtgtatatatacatgtgtatgtgtatatatacgtgtatgtgtatatatacgtgcgtgtatatatacacgtgtgtgtatacgcatacatacgtgtgtgtatacgcatacatacgtgtgtgtatacgcatacatacgtgtgtgtatacgcatacatacgtgtgtatacgcatacatacgtgtgtatatgcatacatacgtgtgtatacgtatacgtatatatatatcagccaggttcggtggctcatgcctgtaatcccagcactgcgggaggctgacgtggctggatcacctgaggtcaggagtttgagaccagcctggccaacatagcaaaaccccggtctctactaaaaataaaaaaattagccaggcatggtggcggacgcttgtaatcccagctacttgggaggctgaggcaggagaatcacttgaacccgggagacggaggttgcagtgagccgagatcacgccattgcccgccagcctgggcaacaagagcaaaactccatctcagaaaaaaaaaaaatttttttttctttgagacagtcttgctctgttgcccaggctggagtgcagtgacacaatcttggctctctacaacctctgcttcctgggttcaagtgattctcatgccacagcctccatagtagttgggatcacaggcacgtgccaccatgcctggctgatttttgtatttttagtagagatggggtttcaccatgttggccaggctggtctcgaactcctgaccgccaatgattcgcctgctttgtcctcccaaagtgctggtgtgtccggagttggtgggttcttggtctcactgacttctagtatgaagccgcggacccccgcagtgagtgttacagcccttaagggggcaaatctgaagtttgttccttctgacgtttggatgtgttcggagtttcttccttctggtgggttcgtgatctcgctggctcaggagtgaagctgcagacctttgcagtgagtgtcacagctcttgaggcggcgcatctggagttgtttgttcctcccggtgggctggtggtctccctggcttcaggagtgaagctgcagacctttgcggtgagtgttacagctcataaaagcagtgtggactcaaagagtggtcagtagcaatatttattgcaaagagcaaaataacaaagcttccacagtgtggaaacggactggaacgcgttgccactgccagctgggacagcctgcctttattctctcatctggtcccacccacatcctgccgattggtagcgcccagtggtctgttttgacagggcgctgattggtgcgtttacaatccctgagccagacacaaaggttctccacgtccccaccagattagctagatacagagtgtccattggggcattaacaaagcccgagctagacacagggtgctgattggtgtgtttacaaatcttgagctagatacagagtgctgattggtgtattcacaatccctgagctagacataaaggttctccaaggccccatcagagtagctacatacagagtgtcgattggtggattcacaaaccctgagctagacacagggtgctgattggtgtgtttacaaaccttgagctagatacagagtgccgattggtgtatttacaatccctgagctagacataaaggttctccaaggccccaccagactcaggagcctagctgccttcacccagtgtatcctgcaccggggctgcaggtggagctgcctgccagtcccgcgccgtgtgcctgcactcctcagcccttgggtggtcggatgggactgggcgccgtggagcagggggtggcgctcgtcgaggaggctcgggcggtacaggagcccacggagggggtgggaggctcaggcatggcgggctgcaggtcccgagccctgccccacggaaaggcagctaaggcccggcgagaaattgagcgcagcgccggtgggctggcgctgctgggggacccagtataccctctgcagctgctggcccgggtgctaagcccctcattgcccggggccggtggggcgggccagccggctgctccaagtgcagggcccgccaagcccacgcccacccggaactccagccggcccgcaagcgccgcacgcagccccggttcccgctcgcgcctctccctgcaagctgagggagtgggctccggccttggccagcctagaaaggggctcccacagtgcagcggtgggctgaagggctccccaagtgccgccaaagtggaagcccaggcagaggaggcgctgagagcgagggagggctgtgaggactgccagcacgctgtcacctctcactgggattacaggtgtgagctaccacgcccagccaaaaaaattttttatagatggggtctcactatgttgccgaggctggtctctaactcctgagggaaagcaattctctcgcctcagccttctgagtacgtgtgattacaggtggagtgatgaaaatattctgaaactagatgcaggtggtggttgtattacattgtgaatgtactgaatgcctcagaattgtacattttaaacaattttatgctatgtgaatttcacctcccttcctttcctccctctctccctccctcccttcctccttccttccctccctcccttccttgcttacctccctcccttccttccttcctgtctttctttctctctctctctctctctttctctttctttctctctctctctctctctttctctctttcttctttctttcttgtctcgctctgtcgcccaggctggagagcaatggcgcgagcttggctcactgcaacctctgtctcctgggttcaagcaattcttctgcctcagcctcccaagtagctgggattacaggggcctgccactacacccggctaattttttgtatttgtatttatttttttatttttgagatggagtcttgctctgtcacccaggctggagtgcagtggcacgatctcagctcactgcaacctctgcctcccaggttaaagcaattctcctgtcttagccttctgagtagctggtactacaggcacctgccaccacgcctggctaatttttgaatttttagtagagacgggtttcaccttgttggtcaagctggtctcaaactcttgacctctggtgatccacccgcctgggcctcccaaagtgctgggattacaggcatgagccaccacacccggccaggctttttaaaattttttttgagacagagtcttgctcttctccctcaggctggagtgcaatggcatgatcttggctcactgcaacttccacctcccgggttcaagtgattctcctgcctcagcctcccaagtagctgggattacaggcacctgccaccaagcctggctaatttggtatttttagtagagacggagtttcaccatgttggccaggctggtctcgaacttctgacctcaggtgatctgcctgccttgggctcccaaagtgcctggattataggcatgagccactgggcccagcctctttttactttcttttttttttttgagacagagtttcactcttgttgcccaggctggattgcaatggctcgatctcgactcactgcaacctccgcctcttgggttcaagcaattctcctgcctcagcctcccaagtagctgggattacaggcatgtgccaccatgccaggctaattttttcttttctttctttttttttttttttttttgagacggggtcttgctctgtagcccaggctggagtggagtggagcgatcttggcttactgcaagctctgcttcccgggttcatgtcattctcctgcctcagcctcctgagtagctgggattacaggcgccctccacaactaatttttttgtattttcagtagagacagggtttcgccgtgttagccaggatggtctcgatctcctgaccttgtgatccacccgccttggcctcccaaagtgctgggattacaggcgtaagccaccgcgcccagcctctatttttaatagagacggggtgtcaccatgttctccaggctggtcttgaactcctgacctcagatgatctgcccacctcggcctcccaaaatgctggaattacagtcgtgagccactgcgcctggctctttttactttctttaatgtgactactagaacattttgtttgtttgtttatttatttattgagacagtgtctgactctgttacccaggctagagttcagtggcaccatctcagctcactgcaatctctacctcccacactcaagcgatcctgccacctcagcctcctgagaagctgcgactaaaagcacacaccactacgcctggctaaattttgtattttttgtagagatgaggtttccctcttgtcacccaggctggagtgcaatggcgcaatctcggctcactgcaacctccatctcccgggttcaaacgattctcttgcctcagcctcccaagtagctgggattacaggcatgtgccaccacacctggctaattttgtatttttagtagagacggggtttctccatgttggtcaggctggtctcgaactcccgacctcaggtgatctgcccgcctcggtataccaaagcgctgggattacaggcgtaatccactgtgcccagcagagatggggtttcacttttttgtccaggctggtcttgaactcctgagttcaagcaatctgctcacctcggcctctcaaaatgttgggattacagttgtaacccactgcatcaggctagaaattttaaatgtggcatactttggatttccattgggaggctctggtttaacactactgtgcctccagagacaacacatcacacctatttcctctgcccagcaggtggaaacccccagggccactgtggacccacagcaaggcagagagaagtcttagaagagccgaggtggggaggagagctgtagctgtccacccactaactggaattttctttcttttttttttttttttttttttgagacaagggctcgctttgtgggccagctggaatgcagtggtgcaatctcggctcactgcaatctctgcctcctgggttcaagcgattctcctacctcagcctccctagtagcttggattacaggcacctgccaccacgctcagctaattttttttttttttttctgagatggagttttgctcttgttgcccaggctggagcgtaatggcgtgatctcggctcactgcaacctctgcctcccaggttcaagcaattctcctgcctcagcctcccgagtagctgggattacaggcatgcactaccatggccgactaattttgtatttttagtagagacagggtttctccatgttgaggctggtctcgaactcctgacctcaggtggtccgcccgcctcggcctcccaaagtgctgggattacaggcgtgagccactgcgcctggccaacgcttagctaatttttgtatttttagtagagacggggtttcaccatgttggccaggctggtcatgaactcctgtcctcaagagatccgcccgcctcggcctcacaaaatactgagattgcaggtgtgagtcaccgtgcctggcctggacttttctttttaattgttaattattttttcttttaaatttttttttttgggatggagtttcacttttgttgtgcaggctggagtgcagtggtatgatcttggctcactgcaacctctacctcctgggttcaagcaattctcctgcctcagcttcccgagtagctgggactacaggctcctgccaccacactcagctaatttttgtatatttagtagaggcggggtttcaccatgttggccaggctgatctcaaactcccgacctcaaattatccacccacctcggcctcccaaagtgttgggattacaggcgggacccaccgtgcctggcctaattttttttttttttttttgccagtcttaactctgtcacacaggctggaatgcagtggtgtggtcatagctcactgcagtctccacctcccaggctcaagtgatcctcccgcctcagcctccgaagtagccgggactacaggcatgaggcaccatgcctagctaatttttgtaacgatggggtcttgccatgttgcccagggtggtcttgaacttctggcctcaggcgatctgcccccctcagcctccgaaagtgctaggattacaagcacgggccactgcacccagccactgacgggactttggattcatggtttggttccagaggtagcaggacctaactctccctggctggctggggcgggtaggggaaagagatggtttcaatatcttgaaccaccctgaactttggacctcctgaagttcaaggacctggagattgttgttctggatcacgatttaggagggggcggaggcgggggtggggtggacgtggcagaagttaactaggtctcaaccagcaggggcgtgtcctcacctcagggaaatggcaagtgtgactggatggaaaccagaaaccaaccggttatagattcaagtctcatcctttttacaattgtatgacattggacaagtaattgagcctttttgagcctttctgactctttattttcttttgagacggagtcttgctctgtcgcccagattggagtgccagggtgggatcagggctcactgcaacctccacctcctgggttcaagcaattctcctgtctcagcctcctgagtaagctgggattacaggtgctcaccaccatgtccagccaatttttgtatttttaatagagatggggtttcactatgttggccaggctgatcttgaactcctgaccgcaagtgacccacctgcctcggcctcccaaagtgctgggattacaggcatgagccactgtgcccggcctgactcttacacttttctgatcagaaactttctcccttggatcctttgaggccaggagtttgagaccaggttgggcaacatagcaaaaccctgtctctttttttttttttgagacggagtttcactcttgttgcccaggctggagtgcaatggtgtgatctcggctcaccgcaacctccgcctcccgggttcaagcaatcctcctgtctcagcctcccgagtagctgggattacaggcatgcaccaccacgcctggctaattttgtattttttagtagagatggggtttctccatgttggtcaggctggtctcaaactcccgaccacaggtgatccatctgccttggcctcccaaagtgctgggattacagctgtgagccaccacgcccggcttttttttttttttttgagccagagttttgctattgtcacacaggctggagtacaatggcgtgatcttggatcactgtaacctctgcctccctggttcaagcaattctcctgcctcagtcccgctgagtaactgggattacacatgcccaccaccacccccggctaatttttgtgtttttagtagagatgttgggcggggtgggggggggggggtctcaccacattggccaggctggtctcgaactcctgacctcagattatccacgcgccttggcctcccaaagtgttgggattacaggcatgagccgccgtgcctggccaaaaccctgtctcttaaacaaacaaaaaaggttaggtgcggtggctcacgcctgtaatcccagcacttttggaggccaaggcgggcggatcacttgaggtcaggagtttgagaccagcctggccaatgtgatgagaccccatctctactaaaaacacaaaaattagtgaggcatggtggcgggcacctgtagtcccagctactcgggaggctgacacaagagaattgcttcaacccgggaggcggaggttgcagtgaggtgagatcatgccactgtactccagcttgggcgacagagcaagactgtatctcaaaaaataaataaataaaaagtaaaaaataaaaattagttgggtgcagcggcacccacctgtagtcctagctactaagtaggctcaggtgggagaattgcttgaaatctggactttaaggccagcctgggcaacatagtgagatccatctctattttatttatttatttatttgagagagggtctggctctgtcacccaggctggagcgcagtggtgtgttcatagctcactgcagcctcgacctcctgggctcaagagatcctcccatcccaacctcccaagtagctgggaccacaggagtgtggcaggctgggcatggtggctcacacctataatcccagcactttgggaggccaaggcaggtggatcatttgaggccaggagtttaagaccagcctgaccaacatggagaaagcccgtctctattaaaaatacaaaattagccaggcgtggtggcacatgcctgtaatctcagctacccagaaggctgaggcaggagaatcgcttgaacccaggaggcggaggttgcagtgagccgagatcacaccattgcacagagcgaaacctcgtctcaaaaaaagaaaaaaagaagtgaggtctcactatgttgcccagccttgtctcaaactcctggactcaagtgatcctcccgtcttggcctcccaaagtgctgggatttaaaaaaaaaaagtagccaggtgtggtggcactcacctgtggtcgcagctacttgggaggctgaggtgggaggttcaattggaggaggtcgagggtgcagtgagctataatgggaccacggtactccagcctgggaaacaaagtgagacactgtctcaacaacaacgacagaaaaccaaaccaaaacaaaaaagaagaaaaagaaaaaagagactgcctctgtctttccagttttggtttccttccttccttccttccttcctttttctctttcttctttttttttttttgagacagtgtctcgctctgttgcccaggctggagtgcagtggtgcgatcttggctcactgcaatctctgcctcccgggttcagaacagcaattttcctgcttcagccttccgagtagctaggactacagacatgcgccaccatgcctggctaatttttgtatttttagtagagatggggtttcaccatgttggccaggctggtctcaagcccctgacctcaaatgatccatctgccttggcctcccaaaatgctgggattacaggcgtgagccactgtgcctggcctgccactttctctacctctcctaagcagccactcccctcacacaagagaattgcttcaacccgggaggcggaggttgcagtgaggtgagattgtgccgctgtactccagcctgggcgacagagcaagactgtatctcaaaaaaataataataataataataaataaaaattaaaaattagttgggcgctgtgaaacccacctatagtggcccactgcgcctggccatccagttagaattaagagtggtctctccgggcgtggtggctcacgcctgtaatcccagcactttgggaggctgaggtgggaggatcacctgcggtcgggagtttgagaccagcctaaccaacatggtgaaaccccatctctacaaaatatacaaaattaggcgggcatggtggcgcatgcctgtaatcccagctacttgggaggctgaggcaggagaatcgcttgaatctgggaggcggaggttgcggtgagccgaaatcgcaccactgcactcctgcctgggcaacaagagcaaaactccatctcaaaaaaaaaaaaaaaaaaaaaaagtggtctaatctttggctgttttccatctggcctccaggtggcgctgtcgactgactccttggcttgttcaggctgtgcaacctcaggtaaaccaaggcccccgggagcctggagcttgggacactaccttgagcaaggccctggacctaattttgtggagttccaaatctaatttgattgtccaattgatttacttttttttgtttgtttgttttgagacagggtctcactctgtcgcataggctggagtgcagtggtggtgcgatctctgctcactgcaacttctgccttcctggttcaaggaattcttatgcctcagcgtcctgagtagctggggttacaggcatgcaccaccacgtctggctaacttttgtatttttcgtagagacagggtttcaccatgttggccaggctggtcccgaactcctgacctcaagtgatccacctgcctcgggctcccaaagtgctgggattataggtgtgaatcacggctcccggatttttttcaaaaatttcaaaatttattatttgtttgagacacagtctcactctgttgcccaggctggagtgcaatggggtggtctcggctcactgcaacctccgacccatggggtgaaggggttctcaagcctctcaggctcctgagtagctgggattacaggtgtgagccactgcacccggccgaagttctagattctttttgtttgtttgttttgagacgaagtcttgctctgtcgagatctcggttcatttcaacctccacctcccaggttcaagcaatcctgctgcctcagcctcctgagtagctctgactacaggcacgcaccaccacgcccagtttgtatttttagtagagacagggtttcaccatgttggccaggatggtctcgatctctttctttttgttttttgagacggtatctcgctctgtggctcactgcaacctctgcccaggttgaagcaattctcccagtagctcaattactacaatggtggggattacaggaacccaccattatgcccggctaatttttgtatttttatagagactgcgtttcaccattttggccaggctggtagtgaactcctgacacctcaagtgatctgcccgcctcggcctcccaaagcggtgggattacaggtgtgagccaccgctcccagcctcgagttctagatttgttaatcagttacagttttctcacctttggctgtttgccagctggcctccaggtgacgctgtcgacctgcctcctcctccacttgtacagactgccacctcaggtcaaccaagggcctccaggccgtccctggagcctggagctcgggacaccccattgaacaaggcccgggacttaatcttgtgcagttttgaatctaatttgattgtccaattgattgattattatactgtggtctttgattggacaaggcggtccttgagactcaggaaacacattttggagaagaaggtgcctgggcacccttagaacatttttccaagctgggcattgtggcatgtgcctgtagtcccggctacttgggagtctgaggcaggaggatcccttgagtctacaagtttcaggccagcctgggtaatataacaataccctgacttaaaaaaaaaaaagtgcttgatgtaatcccatttgttgatttttccttttgttgcctgtgcttttggggccttgcacaaaaaatctttgcccagaccaacatctgagcattttcccaatgttttcttattttccttctttctttcttttttctttttttttttgaaacagagtcttgctttgttgccaggctggagtgcagtggcgcgatatcggctcactgcagcctctgcctctcgggttcaagcaattccactgtctcagcctccagagtagctgggactacaggcgtgcgccaccacgccaggctaatttttttgtattttagtagagatggggttttaccatgttggccaggatggtctcgaactcctgacctcgtgatccgcccgccttggcctcccaaagtgctgggattacaggtgtgagccacctcgcccaggcttcttttttgtttgtttgtttcttttgtttttttttgaggcagagtctcactctgtcatgcaggctggagtgcaatggcacaatctcagcacactgcagcctctgcctccccggctcaagtgattctcctgcctcagcctcctcagtagctggaattacaggcacccactactgtgcctggctaatttttgtgttcttagtagaaatgtggttttgccatgttggctaggctggtttttttttttttttttgagacagagtcttgctctgtcacccaggctggagtgcagtggcgcgatctcggctcactgcaagctctgcctcccggattcacgccattctcctgcctcagcctcccgagtagctgggactacaggcgcccgcaccatgcctggctaattttttttttttttgtatttttagtagagatggggtttcaccgtgttagccaggatggtcttgatctcctgacctcgtgatcagcccgcctcggcctcctttcaaagtgctgggattacaggcttgagccaccacacccagcccaggttggtattgaacttctgacctcaggtgatcctcccacctcggcctcccaaagtgctgggttacaggtttgagccactgcgcccggcctctttggttttttgtttttttgtttgtatttttgcgacagggtctctctctgtcatccaggctggagtgcagtggtgcaatctgggctcactgcaacctctgcctaacaggctcaagtgattcttgtgcctcagcctcccgagtaactaggactacaggcacgagccaccacacccagctaatttttgtatttttgtagatgtggggtttcaccatgttgcctaggctagtctcaaactgctggactcaaatagtccgcctgcctcaaccttccaaagtgctgggattacaggcatgagccgtcgcgcccggcctccaaagtttccttctaggagtttcatagtttcaaatcttagatttaggtttgtaatccattttgatttgatttttgtgtgtggtgagagataggggcctagtttcattcttctgcacatagccagccagttttccgagcaccattttattgaagaaactgtcctttccccagtatatattctttttttttttttttgagagacagtcttactctattgcccaggctggagttcagtggcacggtctcggtgcaacctctggctcccgggttcaagtgattctcctgcctcagcctcctgagtagctgggattacaggcgcccaccaccacatccggctagtttttgtatttttagtagagactgggttttaccatcttggccaggctggtcttgaactcttgacctcaggtgatgcacccacctcagcctcccaaagtgctgggattactgacgtgagccatggcaccccacctaaatatttatatttaagatgacacatatcccaagtacacttgatttgatctttacaaattatatgaatgtattaaattatcacatgtacccccaaaactatgtacatctatgatgcatcaataaaaaaaagtattgagtgtagtggctcatgcttgtaattccaactactcaagaggctgaggtggaggatcgtttgaggccaggagttgcagaccatcctgggcaacatagcaagatgcagtttgcacaaaaaattgctggatgtggtagtgtgcacctgtagtcccagatacttgggagactgaggagggaggattggttgagcccaggagctccaggctgcagtgagccatgatcgcgccattgcactgcagctttgatgacagagcaagaccctgttcatatatatatatatatatatatatatatatatatatatatacacacataaatgtccaaatatatatatatcagagtgggcaggagggaggtcgccttttgcagggctgcagggacaggtatgagagaaccaagagtgggtgagaggggctgggcctgatgtaaacgtgtgcagggctcgtaggggcctggggctgggggaagctcacagggggagaggtagtaggcgtgacgggtgtgacaggagaccgcagcgtgggaccggccatcattccaggcagggcaggggcggcagagacaggagcccagatggaacgtaggcaccctatatagcggacgtggctgtcatcaccgattcaggacgtgggtgggatgacattggtttccgtgtctgtcccctctgcagtctctcctccgcgatggctgcccctgtctgctcatcctcacctggccttcagcaggtgctcagctgacatcggtgagggaatgggagtgattcgtcatcacagtaaccgtgtacttcaggtaaacgctcagaaggaagccagttcccacaggactcacagtgggagacagagcggagcgtccagtgcttcctcggctagctgtatcccacgatgccgggtcatttgcggacacagtctgcacctcctttatcgcttgtgttactgatgtgggttgaatagcatctgctttagtctgtttggactgctataacaaaatatcgtagactgggggattcatgaacgacagaaacgtgtagctcacatttctggaggcagggaagtccaaggataggatttttttttttttttttgagacggagttttgctcttgttgcccaggctagtgtgcagtggcgcaatgttggctcactgcaacctccaccttccagtctcaagtgattctcctgcctcagcctcccaagtcactgggattacaggcgcccaccaccatgctcaggtatttttttttgtatttttagtagagacggggtttcaccatgttggtcaggctggtctcgaactgctgaccttgtgatccacctgcctcggcctcctagagtgctgggattacaggcttgagccaccacgcccagccctgactttttttttttttgagacagaggttcgctcttgttgcccaggctggagggcgatgatgcgatcttggctcactgcagcctccgtctcccaggttcaagcgattctcttgtctcagcctcctgagtagctgggactacaggtgtctgccacaatgcctggttatttatttatttatttttgtatttttagtagagaaggggtttctccatgttggccatgctggtcttgaactcctgatctcaggtgatccgcctgcctcggcctcccagagtgctgggattatgtgtgtaaaccactgtgcccagccaaatgtctgctattgtaagccacccagcctgtgataatttattacagcagccacaggaagagactaatacaactcctatttctttaattttttattttattttatttttttgagacggagtttccctctgtctcccaggctggagtgcagtggcatgatctcggctcactacgacctccgcttcccaggttcaagccaattctcctgcctcagcctcctgagtagctgggattacaggtgcccgctaccacacctggctgatttttgtatttttagtagagatggggtttcatcatgttgtccaggctggtcttgaactcctgacctcaggtgatgcacccacctcggcctcccgaagtgctgggattacaggcatgagccaccatgcctggcccaactcctatttctttaatttttttttgagatgggttcttgctaggttgcccagtctgctctcaaactcctgggctcaagtgatcctctcgccttagccttagctgggactacaggtgcttgctaccacacctgacttctttaattttttttttttttttttttttttgagatgatgccttgctctatctcccagactggaggctctgtcacccaggctggagtgcagtggtgcaatcttgtctcactgcaacctctgcctcccgtgttcaagcgattctcctgcctcagtctcctgagtaggtgggattacaggcacccgctgccacacctggctaatttctgtattttttagtagagacggggtttcaccatgttggctaggctggtctcgaactcctgaccttgtgatctacctgcctcggcctcccaaagtgctgggattacaggcatcagccactgcgcctggccactttttttttttttttaacttgaaacattttatctttttttttttttttgagatagggtttcgctctgtcacccaggctggagtacagtggtgtgatgacagctcactgaagcttcaacctcctgggctcaggtgatcctcccacctcagcctcccaaaatattggattataggcatgagccactgcacctggcctgttttatcacttcttttaaattttttttttgagaaagagccttgctccgtcacccaggctggagtacagtggtgcgatctcggctcactgcaacctccgcctcccgggttcaagcgattgtcctgcctcagcctcccgagtagctgggattacaggcatgcaccaccacacccagctaactttgtatttttagtagagatggggtttctccacgttggtcaggctggtctggaactcccgacctcaggtgatctgctcgcctcggccttccaaagtgctgggattataggcgtgagcctctgtgcctggcccagttttttaaatttatttatttttttgagacagagcctctctccatcgcccaggctggagtgcagtggtgtgatcttggctcactgcaacctccagggttcaagtgattctcctgccttggcctcctgagtagctgggactacaggtgcacgccacctcccctgtctaatttttgtacagtagagacggggttttgccatgttggccaggctgttctcaaactcctgacctccatgatctgcctgcctcaggcttccaaagtgctgggattacaggcgtgagccaccgtgcccggccctgttttatcactttaatcattggtatctgtaagagactggctttgctgggctggtggggctttctccaatgcacagtgaaataaatgcagcttcctggctgggtgtcctgaccccatcctctctgcttccgggtatttccctaaagttgagccttcaccccagcgttgccctgagttcctgaggctggggttccagtcctggaagctggggtgctctggctgggccccctgcacagtctgggctctctcacaagtcctccagcagagcgatgtcacccttccacgtccccaccccagttctctgacggcagctgaaggggatcaggatatgttactcttaaaaatatatcacttagagaccgggcacagtgactcacgcctgtaatccagcactctgggaggtggaggtgagtggatcatttgagctcgggagttcgagaccagcctgggcaacatggcaaaactccatctctaccaaaaatacaaaaaattcaccaggcatatggtggcatccacctgtggtcccagctacttgggaggctgaggtgggaggatggctcgaggctgcgaggctgaggttgcagtgagccgagattgcaccactgccctccagcctgggtgacagagcaagaccctgtctcaaacaaacaaacaaacaatctattatctatctatctatctatctatctatctatctatctatctatgtatctatctatgtatctatctatcaactttagcataagaattattctgagctgaatgcaatagaaaatcagtagatggccaggcgcggtggctgacgcctataatcccagcactttgggaggccgaggtgggtggatcacctgaggtcaggagttggagaccatcctggccaatatggtgaaaccttgtctctactgaaaatataaaaaattagctgggcatggtggtgggaacctatagtcccagctactcgggaggctgaggcacaagaatcccttgaacctgggaggtggaggttgcagtgagtcgagatcctgacactacaatccagcctgggcaacagagcgagactctgtctcaaaaaaaaaaaaaaaaaaaaaaaatcagtagaggcagaaagaattctctgctctctacttttctgcctcaaagccaggcataaacttctctttaagaaggtgacataaggctgggcgtggtggctcactcctgtaatcccagcactttgggaggccgaggcgggcagatcacaaggtcaggagatcaagaccatcctggctaacacggtgaaaccctgtctctactaaaaatacaaaaaaattagctgggcatggtggcgggcacctatagttccagctactcaggaggctgaggcaggagaatggcgtgatcccaggaggcagagcttgcagtgagccaagattgcaccactgcactccagcctgggcaacagagtgcgactccgtttcaaaaaaaaaggtgacataaattttcctttgtggaggtatccccccgtctccttaccagggagagcagaatgactcctatcactgcagatagtcagtcccaagatgagtctacataaacaaaccttcctaaaataactctctgtctccctctctctcttttttttttggaacagggttttgctctgtcacccaggctggagtgcagtggtgtgatcataggtcactgatgccttgacctcctgggttcaagtgatcctcctacctcagcctcccaagtagctgagaccacaggcatgcaccgccatgccgggctaacttttgtattatttatttatttattttttgagacggagtttcgcttttgttgcccaggctggagcgcaatggcatgatctcggctcactgcaacctccacctcccaggttcaagtgattctcctgcctcagcctcccgagtagctgggattataggcatgcgccactacgcccggctaattttgcatttttagtagagatggggtttttccatgttggccaggctgttctcgaactcccgacctcaggtgatccgcccacctcggcctcccaaagtgctgggattacaggcgtgagccaccacgcctggccaatttttgtattttttgtaggaatggggtttcaccatgttgcccaggctggtctcgaactcctgggctcaagtgatcctcctgcctcagcctctcgagtagctgggaccacaggcatgtaccactacactctgcttttttttatttttagtagagacaaggtcttgccatgttgcccaggctggtctcgaactcctgagctcaagcagtccacccaccttggcctcccaaagtgctggggttacaggcgtgagacaccgcgcccggccaatgcctgggcttttgcacctcagggcatttctttttcttttttttcttgagtctcgctctgttgcccaggctggagtgcagtggcatgatctcggctcactgcaggctctgcctcccgggttcacgccattctcctgcctcagcctcctgagtagctgggactacaggcgcctgccactatgcccggctgattttttgtatttttagcagagacggggtttcaccgtgttagccaggatggtcttgatctcctgacctcatgatctgcccgcctcggcctcccaaagtgctgggattacaggcttgagccaccgcgcccggtcacctcagggcatttctatgacaatcatgcccttccaaccttccaggtgatgaggctcaagcaatggcctgagagtatgtgagactggggactaggccaagctccgcccctcttcctcatcccctgatcttcccaccctgtgtctcctgggcaactaacactctagcctgatgatgtgcactgtggaggccttgggtctacctcttggcactcgggcatagacttggcctttgagttcagggctcatggggggcttcggtagtgaacttcattcctgggaggacagatggctgcagcctcattgacagcagagggaattgcacaaaccctggcttactccagtggctcctggacacactcaaccccagcaccatgggagggggaccagaggccagctctgcaatggatgggcagcttgtttagaagcctgtggtggttgccagattgcctggttagaaagttaaacccctccctccctcccttccattccatttttttttttttttttttttgagacgtagtctcactctgtcgcccaggctgcagtgcagtgacgcaatctcagctcactgcaacctctgcctcccaggttcaagcgattttcctgcctcagcctgccaagtatctgggaatataggcatgcaccaccacacctggctaatttttttatttttagtagagacagggtttcactatgttggccaggctggtctcaaactcctgacttggtgatctgctcaccttggcctcccaaagtgctgggattacaggcgtgagcctctgtacccagccttaaaaaaaacaaacttttttttttagagacagcgtcttgctatgttgcccaggctggtcttgaactactggcctcaagtgattctcccaaagtgttgagattacaagagtcagacaccgcactcgacctcaaaactttgacttctcgttggactgatcttttcctagatgccattattttatttatttatttttacttttaatttttttagagatgggatctttctacgtcacccaggctggaatgcaatggttattcacaggtgtgatcatagctggtcttgacctcgtgggctcaagtgatcctcctgcctcagcctcctgaacagctgggactacaggtgtgtgccaccacatttggcttaccattattttagaaggacttacacctgtcttgctatctggagtctgcagatttcttacccaaggtaagctcaagcagggcctgttgtctggaacaagacctgttcaaaatgtttgccttaatgctacagtagtaatggtgatagtcaatagtagcttgctatgggtcaggtactgttgtgagaacagaagctctcaaaggggtattggactctggggatggctgaaacacttcgtgggggcgggggttggtgtccacgagaccaaattattattattaattatctaagatggagtcttgctctgtcacccaggttggagtgcagtggcacgatcttggttcactgcaacctccgcctcctgggttcaagcaattctcctgcctcagcttcccgagtagctgggattacaggcacccaccaccacgcgtggctaatttttgtatttgtagtaaagacggcgtttcactatgttggccaggctggttgtgaactcctgacctcatgtgatccacccacctcggcctcccaaagtgctgggattataggcgtgagccaccgcgccctgccttttttttttttattttgagacaagagtctcattccgtcactcaggctggagtgcagtggtgggatcttggctcactgctaacctccgcctctcaggctcaggtgattctcatgcctcagcctccggagtagctgggattacagtttgtgcaaccacgcatggctaattttttttgtatttttagtagagatgaggttttgccatgttggtcgggctggtctcgaactcctgacctcaagtgatccatctgccttagcctcccaaagtgctgggattacaggcgtgcatgatgcccggcctccttgtcgctttcaaacagtgcttctaggagctaacaaagaagtgcctctttgtatgattccccaagagagacccacccaggcagcacctagccaagggacaaagaccactcctatccaaaagccctttgattcaacttttttttattttttttttctttttgaatgtcatgcaataattcacagtcccaagcccacggttttcaaacaaggtaggaaaaaaggaaaaaagaagcaaaggaatcggtggtgatggtgggtttttcttcttcttttgttgtttcaagcaggaccaaatgtcagaaaaaaatgcctcttttctcaatcattaatttttttgtcctttttaaaattgtttattgttattattatttttttaaattgatttctgcaggcagtaatagtagggtttggtataaccggcaagcactcttgtgtgtgtctgagaacgtgtgtgggtgtgagtgtgtctggtggtgggtgtagggcactgggattctggttccttctggcttctttgccgcactcggccaccagctgtcttcatcagggaaaggaaagattcaattgagatgataaaactcatcaatagaagctatttttttctccccgttttttcttttaaaaatgtttttttttttttttttttttttttttttcatgttccccaaagttctccaaaaatggctgagttaattcaaatcccttggctgtgtggtttgtctgctccctgcctcccacccgagagcccctgtcgtgggtggggggatcggggctggttggggggcgccgtggctgcccaggagggtctcttttggccgagggtctctgcgggacacccttgtggcccagccctggcctctccagagtctggggtctcccggctggccctctcccgggccctctgtgctgggcccccgcggcctctgcgcggctcctcgggtggggtgtgtgcgtggggtgcgtggggggccgggcgggcgccacctcgcccgggcttagcaccaatcatcgtcactctcgctgtagggttcgtgcaggcccttcctggagcccggcccgcggggcctggccagtccgtgcgccgggtagtagccgttggggagtcgccggccgtgccgagaaggcgaggcgcaggccgggcccgaggcccggggagtcctgggcgagcgcccggtggcgcccgaggacgcgtgtcgtacggggggtggcgcgtcgtaggccccggccatggcctcctcgccgcccccgctgcccgggccatcggcctcgtcgtagtcggagccccggtagtagccatggtgccggggacccgggggcccctcggacacgtgcgggccagatgccggccaccgggccccgccgtgtcgacaggccctgggggactcgctccgggccgggcctgggacccgcctctccatcctgggcgagcggccgctgctgtggccccccgtgggcggccgatctccggccagaggctcggccgtggggcctgggtacctccgagggccgctggtggccgcccggcccggcctggccaccgcctgctgctgctgctgctgctgctgctgctgctgctgctgcgggggccccgagccgccggccttacggatcacaggggaataggacacgtgtggccggggggtggagggggtctgggggagctggcggcggccccgccgcggagtgctggtaccagatgttgagggggctgggcttccacttacggaactactgccctacacgaaaattgaaacaaaggaaatcaaaaaaaaagatacaacaaaatcaaaggagacacgggattgggaggaagagaggggagcgaagggagaggggccgggaggagagggaggagggggagggggaggaggaggaggaggaggagaggggggacacaggacattgaatggaaaaaagcaacagccacagggaggagggaggggaggagggggagtgagacagggaggggaggagtcgaaaaccaacacaacaaagtgaaaagagaaatgagaaatggagttttgtaagtttcggggttaaaaatagcagaagtttcaaaaattactcacaggcgtccagaggacagaaatcataattgaaacaaaaacagaagccgggttaaaggaaagtgaaaggtcgggcggcacggcccagaactcaaatatgatccacaaccgaggagcaagcagctgcgggcggcggggagggggcggcgggtgggcaagggggctggggggacagcataggcagctggtgtggtggggatccgtgtccgctccggccgccgggcaccccggtggcttgggggcaggatgggaggtggtcacagccgggatccggggacctttgcctagagtggctgttggatggggtatccccttctctcctccccgcctcccggccgagcccagcctggggtcacttgcagccgcacccacctgccggtgcgccatgtgctctcggccctcgctgggcgagcgggaccagcgctggtcccgagcccgtgcccggccgtggtccggccgttcctgggcatagcggtccttgtcggggggcgggggatggtggtggtggtggtggtggtggtggtgctgtcgatgcttccgatccttgggccggccccgctcctggtcccgctccttcgacggcaggtccccggattgggtggtcatgctcaggtctgtccccaagcctgggccgggtgagggtcagacagacacacaggtggtcgtgagggagaggtggggcagatgcacacacaggaggccacctggaaggtgtgggggccctagagatcccctgaaccgaggcaggtcagtgggttggggggagggggtagtacccaggttcctgcagctgctgcctggccccctctgtcccctctccatggaggcctctccctttcttcttccttagtgtctcctccgccctgccttctcctcccctctcctctcctctgttctgcttgtccctgagcaccacagggctgcccacctgtgtccacatcggtgtagcggcccagggagcgctcagaggcgcggtggctgcggtcgcggcgccgctggtggtgccgctggttctcctcgggcgggacccgctccagcgagtaatcgtccaggcgtcgggccttggggcccagcacggaggctgaacgcttcatggggctggtgtctgagatggtctgggggaggggacaggccggtgggctggggtcagcagctagcaccaagtggtcccggtccttcctgccccattgtggcagcctggtggtggccttcggtgactgcggtgtgaccatcctggggcaggggccaggggatgccatggggccttggctccccctgatcaatcagggctctgggtgtggccaggcctctgagggtggagcctgaggattcctctgtccctcagagacaggactgctccttttgagcccatcctgggttctgaccagaaagatctgatcctcactctccagtcctgggggcccagccacagttgggcaggctcaggctggccagagggaagccctctccacatccagggtgcaaacctgggagccctggactgccgcactcatccctgccccagcttgctctcctgggagggtgagaagcctccgactgtggctggctgacctatgggctcaggaccaggtgcccggcatggcagctttgggtcctcccggctaacggggctgtgctcgctgcccccacaagtctgagtccttctggtgaggcccaagctagggagctctgggtgggggtgggggatacccaggcactggaggctctgggggcccactcttttccctggtgcttcatccctgggtcaagccctgacacacaggtttctctgcagcaggcagaggagggaaggagggagatggggcagacgcccgcctcccagggtccagcccagctgagcgctggtggccctgctccaggtaggagctgcaggaccaggggttggtggtggtgtcaggagaagaagccccccagaaagaggtgcagagtgggccaggctcttggagagccagtgtcctccggcgtggggggccctgaagaaaagggggtaggggtgaggatggggatggccccgcccaccagggcttatgggtgaggggcacacacaggacaccacacacaaggattgggctccatggaggggagagggtgcgattgccaaagaaagggtggggtccggggacggtgagagatgacgggactccctggagggggggtggggaggaagagggggccggagccctgctgggcgctgggcaggcgcggtacatacactgaggttattcccacgtggccggccccttctcctctgtcacagccccatgggatggtgcacacagaaaaaacagaaagaagaaaataaatataaaaggcaagagggagagtgaggaggtggtgcatggagaagaagccaaggaggggagtggcactggcatcaagagaaatcggagggagaaggcagggaggaaaagaaaagttaaagtcctggcgggtgggtgtcccaggcccccggggctgggcgtcctctattcccatgggtacagaggagacagacaggagatgcagacagacaaatggcagaggcatgggaccgaaagacaggacggcgcagcctcgagcccctggccctgggctctgcctcatgcgatgcacaccccaacccctggctccggccgatgctcaaagcttccatgtggtggccgtcagctgggcttgtcccaaccctctcctggggcccagcagctcggtcctgagggagcagcagcatgcacgctgggtgctccccaacccacgttcccagcagccagaggccaggccctcaggtgaccctggtccagccaggcacagcacagcctcctgccccgtgcagacgccacacacggcacacggaaagctcgccacagccacacatgccacgcacccgggccaggctctcacagccatgccctgttctcctccagaggcgggctgcgtgcatgggcccccgctgttcaggccgggtgggcagccagctatgcctctgggccctctgtcccatgagtccaaggcaacgggatcacctgcaggtgggcctggcagctgggtgaagcggccacacacagacacacatcaagcacacacccctgtgccccccaatgactcccacagagaccagacagaaaatacgagcccagctgcccccagacccaccccagactctgctactgtatcctaggacctgccaagttcccatatgcagacacgtgtgcacgtacatgtgtgcatgtgtgagtacatgtgcagtgtgtatatgcccacgtgcacacacgtgtgtgtatgcaagcatctgagtaggcgcacagctgcacatgtgtgtgcatgtatgttgagcatgtgtgtgtgtgtttgtgtaggggtgatcttcgtggcaggtctcagctggccctgttgaaccctgctgcacccacaaatcttccacaacctcccctgtctgcagcctccaaccagggcagccagagaccattttgcagtggccactgccctctgccccagggggagcactttcctctctgtcctctgtgagggaggagggtctgcaggtgctccaggtgtgaccaggtggtgggtggggcctgcagactgcttcagagactgaaggagtccctacccaggcctgagtccggcagggaggggatgcactgggctgcttgtgggggggcctggccctacccagtgcagagtgaggggtccagccccagggcagtggtgaaagccctcacctggttctctgcagggaggcggggcatggaggcagcccggccctggccttccatggggaggtagtgctcgctgtcggagtagccatctctgcccatctctcgcatctccacggactgcggagcagatggcaaagccagatgagctctggggcctgacctccagatccctggtgtctgcagagggagggagctgcaggtgtgtgtgtgtggggggcccagatcccttccacctgaaccacccgggccctgggagccattggggagttgggggacagaggcacctgagagttaggctggctgttgggcatgtcggtaggggggccttgttccggactccatgtgcccgtcttctggaacatctcctgggcacgctgggtcacccaggacgggctctccttgaggccgctttcgtgagccatcctgcatgggggacagaggccggggtagcagtgggcgcttgggcagcttccagaacgtggggaccacggcacccccacactccacctccctggcaggggtgacactcacagggctcctcctgggtccagctgggtggaggggagggcgttctggccaggtcccccttcctgcgttggggacgggggctccatgcgctggaacatgaggggtgtccggtcctggggaatggggcagagagcagtgtgtggacaagggtggggtggtgggacggtggtacccagaaggcattgcgacatccccagtatacacacacacacacacacacactctctcaggtctcatccatctagacccttccaattccacgcagaactggaccacttctcactcctccacccaagtcatagccccagcctggtcccacgtcctcatctctcactgcaggcaccttctcccaggtctcccgctcctaccttcaaccccactgttccacaagagccaccagagggcgcccatgagcacttgagtcaggtcctatccctcctttgcttagaaccctccatggctcccacttgcttggggaaaaagccagagtccttcctgcagctcccatggccctgaaggatctgccctgtcacctccttgcccttgtctcctccctgctcttttccaccacactggcctctttgctgttacccaaacaacccaggcacggtccagcctcagagcctttgcactggctgtttcctctgcctggaacacccttccaggtattgcttagctcactccctctccccttttccttcaagcctttgctcacatgtcactttctcagggaggctccccaactacccatttcccaccgcatcccctcctcccctggatactcctatcttctggattcttctccactttcccccacgacactttctttctctttgctggatgttgcacgattcagtcatttgctaccattggcatttccccacttggaatgtctgctccctgagggcagggattctggcctattttccccatgggtgcatccccgaggactgagaacagcgccctgcacacagtaatactcaataagtgttggtggagcagctgaatgaagaatgaatccacatgatgtgtccttggcaagaacttttttttttttttttttttttttttttgagatagagtcctgctcttatcacccgggctggagtgcagtggcttgatcttggcttgctgcaacctccacctcccaggttcaagtgattctcctgcctcagcctcccaagtagctgggaccacaggtgcatggcgccacatgcagctaattttattttttttttgtagagatatgggtctttctatgttgcccagactggtctcccactcctggcctcaagtgatcctcccatcttggcctcctaaatagctgggactacaggtgtgcaccaccatgcctggctaatgttttattttgtagagatggagtctcactgtgttgcccagggtggtctcatcctggtctcaaacgatccctctgccctggcctctcaaagcactgagattgcaggtgtgagctgctgtgcacagcccctacttttcagggacctgccctggggctcagccaccctcatattccagttggttcccgtggtgacatgcaagccactgtccccagcccagatgtccccagagcggcgaacagcgcacctgctcctcgcgcatggcctgcagcttcttggccttgctctgccggtagtactccatgatcatcatggctgcgtagatcttccccacggtgaggtccgtggctgggggcacacacacggtgagctcaccaagggcaggcctctttggggcccttgtcctgggtccctgtgtataccagcccaggccaacactctccccaggcctcccctttccctccccctccatctgtcctggtggattggatcccagggctgggctcagctcttacacttgtgaggtgtgaccagcaggtctagcgtcttctgggacagattgggccaaatcgccatcatctccttccgcagctcagcgtccatctgctgtttgtcggctcctcctgcaatgggggtgtagacagaccctgactgcctgcctgggtgtcagctggactctgggtcagctgcaaagccataggctcccgagaacgagaccccaatctttctggtccccatggggtctccagttccccaacggcctggcccagaggaggccctgggcagtgctgctggaatgaccttgtgggctctggttttcggtggggccaggaccatggagcagctgtgcaggagacagcccggcatggagaacagctgggcgacctgggtcccaatcttgtctcccagttatcggctgcatgacttaggttactctaccacttagtaactcagtttctccatctgtgaaatggagatgatagcaagagtacttgcctcacctggttgttgtgtgtgtgtgtgtgtgttttttttttttttttagacagagtcttgctctgttgcccaggctggagtgcagtggcacgagcttggctcactgcaacctccgactcctgggttcaagcaattctcctgtctcagcttcccgagtagctgggattacagacatgcaccaccatgcctggctaattttttgtatttttagtagagacggagtttcaccatgttggtcaagctggtctcgaactcctaacctcgggtgatccacacgcctcggcctcccaaagtgctgggattacaggcgtaagccaccgcgcctggctggttgttttttttttgttttttttttgagatggagtttcactcttgttgcccaggctggagtgcaatggtgcaatctcagctcactgcaacctctgcctcctgggttcaagcgattctcctgcctcagcctcccgagtagctgggattacaggtgtgcaccaccacgcccaactaattttgtatttttagtagagacggggtttcaccatgttggccaggctggtctcaaactcctgacctcaggtgatccaccctcctcagcctcccaaagtgctggcgattacatgcgtgagccaccgcgtctggcctgttttttttttttttttgacagagtctctctctgttcccaggctgaagtgcagtcatgtgatctcgactcactgttacctccgcctcccaggttcaagagattctcccgcttcagcttcctgagtagctgggactacaggcacgcaccaccatgcctggctatcacctggttgtttgatgatcaaagtaacgtgcgtgcagccttgggacagtgtctgccataggattattactgcagtgacccatctgttcaaggctgggacgccctggagcatccccaacagaggaagttttggttttggttttattttgatttttgagacagggttttgctctgtcgcccaggctagagtgccgtggcacaaacatagctcactgcagtctcgacctcctgggctcaagatcctcccacctcagcctcccaaagtgctggaattacagatgaaagccactgtgcgtggctcagaggaggtcttttcccctttcccaagtctccactgccacggacatgcccttggcctgcagccagtccctcgtccctcaccccagtcatggggtgagtcattaaagctctctgacggtgtttcctggccctcctacctgagtacatgggggggttcctcctgtggttggcagggccatgtgatgagtccttgctaatggggtgtgcaccatgtaatgtgccactttggggccagagcatttattattatttttattattgttattatttttgagatggagtctcgctctgtcactcaggctggagtgcaatggcatgatctcggctcactgcaacctccaccttcagagttcaagcgattctcctacctcagcctcctgagtagctgggattacagacatctgcctggctatttttatatttttgtagagacagggtttcaccatgttggccaggctggtctcgaactcctgacctcaggtgatctgcctgcctcggcctcccaaagtgctgggattacaggcatgagccactgtgcctggcctattattttttttaaaaatttatctatctatctatctatctatctatctatctatctatctatctatctatcatctatctatcgatcgacagggacttactctgttgcccaggctgtggcacaatctttgttcaccgaagccttgagctcctgggctcaagcaatccacattctgacagtcagaatgtcactgtgggctgctatttggatatgctaactgggtttacgtttaatatgctaattggttcaggcaggtagttggctctgccctcaatgcctggggtggggggcttgaaagaggatagggtccagcctggtcaacatggtgaaaccagtctctagtaaaaatgcaaaaattagctgggcgtggtggcgtgcgcctgtaatcccaactactcgggaggctgaggcatgagaatcgcttgaacctgggaggtggaggctgcagtggtgagttgagactgcgccactgcactccagcctgggcgacagaacgagactccgtctcaaaacaatacaaaacaaacaaaaccaaaaccaaaatagagattcttctgggcagagagaacagaggggtgggtgggagagagaaacagatggacagggaagagagagagagagacagagacagagagaatgagatggacttgccccctttctcccagtctccagcaatgaatggtgacaccatttttgagaatctgaagaatgaggttaatctgtaccccctttgcagccccttagcctgctggaaaggaagctcagtgtgcttagaaagtgagctgaactatgaaaagaaagcgcgttatgttctcctgagacccgcatctgctcaaagggctgccactgttatcactcttccattgttgtccccacaccctcttgaccttccgtaaccccgagagcctggctcagctgtggaactccaggatgaggcctggcacccactgaggacaagaggtggaggggctcctggctgagaaatctgggggatcattgtcttcagggaactgagtggcatctggggtacaagtaacaactgtgacagccaaattcagagacatctccaggagtctttgaaaccctcaggaagggaatccagtaggtgtcatagaagctggggtgctaagcagtaaggactagctcagtaggctagtgttgtccaaaccctgcacattccgatgaaaggactggcccattgacttgctcctgggaggtgatctctaagcctttgaaatgtcctgcctgaagagtgtctttatttagcagggggccttgggccacactgtatagttcattcttttttttttttttttttttttttaaaaaaaagagatagggtctcactatgttgcctaggctggtctcgaactcctggcctcaaacgatcctccagcctcagcctcccaaagtgctgggattataggcatgagtcactgtacccggccaatacagttcattctatttatttatttattttgagatggtgtttttgctctattgcccaggctggagtgcaatggtgcgatcttggctcactgcaacctcggcctcctagtttcaagtgattctcctgcctcagcttccccagtagctgggattacagccgcccgccgccacgcctggataattttccatacagttcattctaacaatgcgatttatcgttggggtcttgggccacgtggtatcagtttgacctctggagggactggagactgagtaactacgtcagccctgcctatatgacaaaccctcaataaaaaccctggggcaccaaggctcaggtgagcttccctggttggcagtacacggtgcgtgttgtcacacactgcagggagaattaagcgttgtctgtgcaactccactggaggcagacaactggaagctcgcacctggtgtctcctggacccttccccagatgcccttcctttgcgcattttatgtttttggaatttgtttgtttgtttgagacagagtcttgctctgttgcccaggctggagtgcagtggcgtgatcttggcttaatgtagctctatctcctgggttgaaaggattcttgtgcctcagcctctggagtagctgggactacaggtgtatgccaccacacctggctaattttctttttggacagagttttgatcttgtcacacaggctggagtgcaatggcacagtctcagctcactgcaacctctgcctcccagggtcaagcgattctcctgcctcagcctcctgagtagttgggattacaggggtctggcaccatgcctaatttttgtatttttggtagagacggggtttcgccatgttggccaggctggtctcaaacttgtgacctcaagtgatctgcccgccttgccctcccaaagtgccaggattacaggcgtaagccaccatgccaggccctttgcagattttttttttttttttttttctaatagagtctcactctgtccagcctggagtgaagtggcgggatctcggctcactgcaacctctgcctcctgggctcaagtgattctcctaccttagccttccaagtagctgggattactggcgccagccaccacgcctggctaatttttgtatttttagtagagacagggtttcaccatgttggtcaggctggtcttgaactcgtgacctcaagtgatctgcctacctcgccctcccaaagtgctgggattacaggcgtgagccaccgtgcccggccctttgcagattttaatctatattctttcactgtaataaactgtgagtataaaaacttttctcagttctgagttcttccagggaatcactgaacctgtgggtggttttgggacccctgaacacagattctcagagtgccacagaagctgagttacgatggcattacatacaaagagtgggggtgttgttagacccgttgtacaaacgaaggaactgtggtaggcagaattcaaaagctgcccttctgccaagattctgtttattcaaacactaatctagggaccattgcccaggctatgaagggactttgcagatataattaaaataccggaggcccggtgcggtggctcacgcctgtaatcccagcactttgggaggccgaggtgggcagatcacgaggttgggagatcgagaccatcctgctatcatggtgaaaccccgtttctactaaaaatacaaaaaattatccgggcgtggtggcacgcatctgtagtcccacctacttgggaggctgaggcagaatcacttgaacccgggagatggaggttgcagtgagccgagattgcgccactgcactccagcctgggtgacagaacaagactccgtttcaaaaaaaaaaaaaaaaagaaagaaaatgctgggcatggtggctcactcctgtaatcccagcactttgggaggctgaggcgggtggatcacctgaggtcaggagttcaaaaccagcctggccaaccttgtgaaaccccatctctactaaaaatacaaaaaaatttagctgggcgtggtggtgggcacctgtaatctcagctactcaggaggctgaggcaggagaattgcttgaacctgggaggcggagattgcagtgaactgagatcacactattatactccagccttggcaacaagagtgaaattctgtctcaagaaaaaaaaaaaatatcaagtcagctgacctcaaaatacagagatgatcagggtaggcctgccccaatcaggtgagcccttgaaaagcacagtattgtctctgctgggtggcagatggggaagtcagagagaatgagagcacatggaggattacatgcacttccaggagcaaaaagctaaaaagccagtgataaaacaagacctcagtcctacagccacaaggacttcaattctgccaacacctgaatgaacctggaagtagattctcccccagatcctccagagaggagcccagcttggctgacaccttgatttcagcctcgtgagaccctcagcagacagcccagtccagctttttggacttctgacctacaggactgtgagctgacaaataggtgtgtcttaagctgctatgtctgtggtcatcatatagctcactgcagccttgacatcccagtccccagtgatcctcccactccagcctcccaagtagttgggactacaggtgcacatcaccacacctggctaattttaaaattttctgtagagatggggtctctctgtgttggccaggctgatcttgaactcctggcctcaagtgatcctcctgccttggcttcccaaagtgctgggattacaggtgtgagccactgctcccaacttccttgtgctctctttaccttcactttgttcctggcattaacaatatctgtcctccacccctccagtcccccaccttccctgccacttcctccttgagtcttgccacgtggccttggctcttcctcccttctttccctcaagaccctggaaggcacatatgtctcgaggctcagtcttccctcctcctgacttactagtggtttcagctgggctcagcaccttcccatgtgtgggactatccacctgctcctctcccacccactccttttttctggtcccatttgttttttcttttctttctttctttctttttttttttttttttgagacagagtcttgctgtgtcccccaggctggagtgcaatggtttgatctcggctcactgcaacctctgcctcccaggttcaagtaattcttgtgctcagcttcccaagttgttgggattataggtgtgcaccaccatgcctggctaatttttgtatttttagtggagatggggtttcgccatgttggccaggctggtctcaaattcctggcctcaagtgatccaccttcctcagcctcccaaagtgctgggattacaggcgtgagcctcaggtccccgtttcttctggcaattgtgcgcctgtctctctgccctgctgtccttaatcagctgccaaatcacatcacatcccctttcgggcctccgaaatgcactccagacaggggacccctgacccctccgccaaagctgcactggtcaaagtgaccatgatgaccagtcacttgtgatccttgtcatccttggtctctgggcagtgcctgacacggttggtccccttcctcctgaagccgcccttttaaacatagaagctgcctccaggagcccacactgccctggtctctgcccgcctccctggcctcctcttcttctttccccctaatgatggagagtgagccctgagctaggtctttgggggaatttctcggtattttttatttttatttttatttttgagatggagtcttgctctgtcgcccaggctaaagtgcagtgatgtgatctcggctcactgcaatctctgcctcccgggttcaagtgattcttctgcctcagcctccctagtaactgggattacaggtacccgccaccacacctggctaatttttgtatttttagtagagacagggttttgccatgttgaccaggctggtcttgaactcctgacctcaagtgatccacccgcttcagcctcccaaagtgctgggattacaggcacacgccacgacacccggctaatttttgtatttttagtagagacagggttttgccacgttggccaggctgatctcgaactcctgacctcaaatgatccacccacctcggcctcccagcgtgctcagattacaggcgtgaaccactgtgcctggcctcaacaaaatgctgagattacaggtgtgagccaccatgtccagccttctcggctttttttttttttttttttcagatgaagtctcactctgtcacccaggctggagtgcagtggcacaagctcggctcgctgcaacctctgcctctcgggttcaagcaattctcctgcctcagccttctgagtagcagggactacaggtgcgtgccaccacacccagctaattttttgtatttttagtagagaaggggtttcaccgtgttacccaggatggtctcgatttcttgacctcatgatctgcccgcctcggcctcccaaagtgctgctattacaggcgtgagccagcgtgcccggcctcagctttttttttttttgagacagcgtcttgctctgtcatccaggctggagttcagtggcgcgatcttggctcactgcaacctctgtctcccaggttcaagtgattctcctgcctcagcctccggagtagctggggttacaggcgcccaccatgacacccggctactttttgtatttttggtagagatggggtttcaccatgttggccaggctggtcttgaactcctgacctcgtgatccacccaccttggcctcccaaagtgctgggattacaggcgtaagccactgcgcccagccccttctcagctttaaaaaaaatgtttttttctttttctttctgttgttttgagctaggatctcgttctgtcgcccaggctggagtgcagtggtgcgatcatgactcactgcagcctcaaactcctggcttcaagcaatactctcatctctgcctcctgagtagctgggaccacaggcatatgccaccatgtccagttaatttaatttaatttaatttttgagacagagtcttgctctgtcacccaggctgtagtgcagtggcgtgatctcggctcactgcaacctccgcctcccaggttcaagcgattcttctgcctcatcctccctagtagctgggactacagtacccaccaccacgtctggctaaattttgtatttttagtagagacgggggtttcaccacattggccaggctggtcatcctgacctcaagtaatccacccaccttggcctcccaaagtgctgagattacaggcgtgagccaccacgtcgagcctacccctagatctaagctgccgccctgtctccacccagatgatatcagcagcccccacactggcctcctttcggtctcccatcccctcagtggccggagggaacctgttcaaatgtgagttgggtcaggttcctcctctgctctgaacctgcgtggcgtgccctcactcagaaggtgagtcagctcaatgccccgggtgtcctgtgttcacccctctgtcagggcctttgccagtccttctgcctggagcaccttccccccagggatccatgagacactgccttacctcctcagtggcggcctccccatccatctaaagtgtaagctgctgggtcctcccctgcttggacgggtctctggcacattgaaggagtgcactaaatatctgccaaatgggccgggtgtggtggctcatgcctgtaataccagcattttgggagaccaaggtgggaggactgcttgagcccaggagtttgagaccagcctgggcaacctgatgaaaccccatctctataaaaaatataaaaaattaggttgggcatggtggctcacgcctgtaatccagcactttgagaggtcgaggcaggtggatcacttgaggtcaggagtttgagaccagaggtcaggagttcgagaccagcctggccaacatggtgaaaccccatctctacccaaaatataaaaaattagccgggtgtgctggtgggtacctataatcccagctacttgggaggctgaggcaggagaatcgcttgaacccgggaggcggaggtagcaatgagccaagatcacaccactgcacttcagcctgggtgacagagggaaattgtcacaccaaaaaaaaaaaaattagccgagtatggtggtgtgtgcctgtagtcccagctactggggaggctgaggtggaaggatcacttgagcctgggaggtcaaggctgcagtgacttgcgatcatgtcaccgcactgctgcctgggcaacagagcaagactctgtctcaaaaaaaaaaaaaaaaaaacaccaaaaccccaaaccccaaaaaaccctgtggaacgaatgaatggaagagtgaatgaagatccgggtggtgacagcagatcctctagtttggggtagggagggagatccccggttccaccctgtcacgcctgtctgtgcccgcccctgtcccttccttacccttggcaatcttgatgtccagggctgtgcggatcagagccatgagggtggaattgaagtggacggtgttgtcatctgcgacgggcaggtccatccgcagaagccgctacagaaaacccaaggcaagcgcagtcattcccaggcatccctcctgggtctcccgtgagccgcgcccgcccctacccagggagtcccaggaagaactctgaaagctgtggcggctgaggtgtctcttacttaggttacctgtcccagtactcagtttctcttggtggcccgcagggagggcacaaaaggctctcttgtacttctggtcccctgccctctccttttttcccccacctgcttgacctgagagctggcatttccagggtttgcctcaacccttgccccacccccgccctgccccagagttcttctggatggccccgtttcagtctgaccccaaagaaaaagagcacaagctggatttgagcagtgcatgcaacagccaaggctgagggggccaggaccacagccgctggtggggggtgccactggctccccacacccaatccctggcttggcccagaccaggacagagcagatgggcacagaccacatcattcctctgagaagcagcaggcaggcagccccccactgacggggcaggcccctcgcaggcatgcagcgaggctgtgacacagaacagcacagacaggggcgcatgcagacggaatctcgagactcattcatagctccgtgggaagtgtatctcaggggcatgtccagatcttggctctctgtgcaatggcagggggaaggggtgaggggcactcccttccagcccagggaagaaaagattccccatgtcccaggcaggggctctgtccaccatgcttggtggcatgggagaggatgctgggctggtgtgcaccagcccaggctgaagtggcacagagaaggggggtgagggcaacttgggtggggattcagacacaagtgggcaggaaacacagagttgaagatggggaggggtatggtaaatccagagcaggacactggaggggacactgggggtagggtggggaaggaggtgggaaatagagaaacacacatagactgggccactgtgcacagttgtgcaggttgtacaccgcacaaagggctcccatcttggaaatgatagatttatgtacttatttattaattaaaatattttttctttttgtagagatggggtctcgctatgttgcccaggctagtctcgaactgggctcaagtgatcctcccgtctcagcctcccaaagcactaggattacaggcatgagccaccacgcccagcccccgatttgtatattaaatataacagcttcccaggtgatagaaaaaaagtgtcttgttctcaccacattggtagattgcaacaattttccaacaggcatgttctgtggaaagggtgcctttttcaaatttgcacaaagttgtcttatggacccatggtggtcctgcacaaagaccaggagaggaagggctcgccctccctctcttgcacatgcgcacacattcatctaagcagagactgagagaagcgacttgaggaaaaccgggggggggggggggggcggcagggaggggcacagagcgacaggtgccaggagaggctcattgtctgagatgctggtgggacaaccttgtccccggctttgattgagaaggaggggagacatataggttaggtgaggaggggtgcacagaggaaggaaaggaatgaggtggcaacacggggcaggtacaaatagcattgatggatagggacgcagggaagatcaaggtggatgggagaataggatgatggggtaatactttttgggtggggagaatctttaaaggtcatccctgaacttcttgtggatgaatggagggaacagagcatctgtccttgggcaccaagggagattccaggacagggatctggaggggtggcccgggccagccgcttggcggcaggacgctcgctctctcagccagcatgcaccaccccccgtcggccatggtgcctgcccgccccaggccccgccaaggcagcgtgcatggcctgcatcagtgtgccaccgtccaggggtccagctgcggccgcctgcccactctggaacaatggagaggcatgttggggtgtcttggggggattagggacgggggctggggacgaaactccaggggaaggaagggaggggaagagaggttcttggtgctccttggaaggtctcgaatccccaaggccctaggtcagagatcagcttcaggtgtgcgtggcaggggcggggacccgggacctcgcctgctttcgggggctaaagcccctctctgcaaggcgcctgccccagcctgggcatgggggccgctctgggtgggcagaagtgggaagcatgggttttgactccctgaagaagcgtgtttgtttccaatttggtacctgggagaccaggtgcaaggggacctgggcgctcccctccccctccccccggcatgtcggccataatggagtctcaaaacacgaagacactcatcagaaaggacggacacagtgtgctgcttagaatcaagggatggtcatgatcagttgactcgagaaaagaaaaaaaagaatcaaaaacaaaaaagaagagaaacgttggaaaaagagagtcggccgggtgtttctggtcagcactaaaaaaaaagaagaagaagaagaaaaaaaaacccagtgcctggacgtcggtggtcggcaagggtagtctaccttgtaagccactctggccggacacttcttccccagacccaggggcggagacatgtgtctcagcatctgatacatgtccaggtaaggcatgcggcccctggcagcaccgaaaatgaaaaaaacaaaaacaaaaacaaaaaaacaaaacgggaatgggaacagagaaccaaaggaagagaggtggggagaaacagaagaaagaaaaaagaaatccacacgagccgaaaaaatagagagagaaagatgcagagaatgataaaatagatatttcaaatcaatggaaaagaggaggaaaaaaaatggaagaaaaggtcagtaaaaaaagattacttcactgctcgggagcagggagagagagagaaaagagaaaagtcagattcagcgtgggctctgagctacagttctggagggatgcggaggggagggagaattctcactttggaagacgtagagccatgcttttgttcattgcctttttttttttttttttttttttttaaagagacagggtctctctctgtcgcctgggttggagtgcagtggtgtgatcatagctcactgcagcctccacctcctgggctcaagcaatccttctgcctcagcctcccaagtagctgggactacaggcatgcgccacaatgcctggctaattttttatagagaagggggttcttgctatgttgcccaggctggtctcaaactcctgggctcaagcgatcctcctgctttggcctcccaaagtgctgggattacaggcatgagccactgcgcccggccatcactgttatttctacagttgggtcacgttctctggtttggctgaggctggtctctgagggggcctaggtggggagcaggggccagtgccagggaggggaggagggctaggggctttgggaggtgaggggtggagggggagagagtggaggtgatggttgggggagaaatgcaaagttacaatcccccaggggatgtatctgatttggggtgccgtggagaccccaggatgggcagcttcagctaagagcaagcaaagatggctgaaggctgaagggaaggaggaaatatgttccatgctttatcgagtctacatgactgcattctgttggctaagagagttttctagtttaatgcaagaaagagagatggctctgtttttttagagagagagagagatatatatatatatatatatgaaatatatatattgaagaaccccaagccacactcattccatggatgctagcaggttttagtggaagtcaaaccttgcaagcaaccctatgaggacatttcttgcctaagccgagagggggagatattactcgtaataaactgtacatatccttataatgaatccgaccgctgaaaggagaagaaagggggttagtgcaggcaatgggttcacacgggctccctgggcacacagcgaggtcatgatgcccgaggctggggtgtccctggcttgaaggagtgggagagactggggacaagtgaaggtccccagtacattcccagacactggggagacccaggggtgtaggatgtcagtcgagttcgggactgcagggcacctcccctggggctctctctgcatctgcctcctccacagtctacatgggctacaggggtgggggggggcttgtggaatagaggccttggggacagcatccaattgctgtgacctaaaatcaaaagaggaagagttaggaaccagccaaagcccagccccagacccacggctctccccagcctctcggtctcatggagtacttgtttgaggctatgggaatagccaagaccacctcctgcccaccttcctcgtgacggcctcctctctggtgctgaggccagaggaagatggggcttaggctgctgagggccccccagtaatgcttcttcaggccccaagaccagcctgaactaaatcctcagttagtggctggtgggttccaggtattcagataaagcctctgagtgtccttcaaggcttggtgttgggtgggcactcaatacacgtgcacaaggtggaacccaccctctgaaaccattgcccgtcagtggagagggacccctctggtgtctacccagatgggagcgcccactccctttgtggccacaaagatgcatgggcccctgaggctctgcgtcctcccctggcctgtatgtcctctcactcccaggttcacgggtcccagtgggagctgagttctgctactctgatgttgctgccaatcctgtctgccaagggtaggccagccctcctccccacactctcaagagaactgaggctgggatgctgttggttttctccctggagcctggctaatgcatcctcaccatctggagacttcacagtgagagacaggagagactcgtaggaggagagggctcttcaggacatctcatggttgacgccctccctcatttcccagaaagtccagggtttgggcagggttggcaccctacgtgtttaatctggggtatgcaagggtgatgattcttatatcttctctcctgactgaacctgtgagacccctgctaggaccccaggagttcagtgctccagagtctggggcctgacctagcccgtgttccagttccagggagaggtgagtattgtggctggaggattcggggtgacttcttaccaagctgcggggtcatactcggcccagacacgcacgtactcatccaggtggtgggggcccaggatggaggagtctcgggtgaggtactcaaagttgtccatgatgacggcgacaaagagattcagcatctgtggggaccccggggaccaagagagaatgggggcagagaccgagggaatgaatgagtgagtgagaaggatacagacagacagacggacagacagacccaaagacatgtacacagaggcccagatggagagagggatagagagaagatggggaaaggaaatgagacagagacagaaagagactggggaatggagaggtgatgctcactcacacaaggaggtccagtgagagagagatcaagtggagagatggggaagaggaagagagaaacagagagagatggagagagagagatacaaagagacaaagactggccgggcacggtggatcacgcctgtaatcccagcactttgggaggccgaggtggacagatcacttgaggtcaggagtttgagaccagcctggtcaacatggtgaaacactgtctctactaaaaatacaaaaattagctgggtgtggtggcatgtgcacctgtaatcccagctacttgggaggttgaagctgaagaatcggttgaacctgggaggtggaggctgcagtgagctgaggtctcgccactgcactttagcctgggcaacagagtgagactccatttcaaagaaaaaaaaaaaagagagagagagacaaagaccaagaatgatggaaagaaacagagtcagtgagagggaggggaggcttctgaaacagggaccaacaccaagagaaccactgtgaccccaaatcctcccacatctgcccccaacaaggccaaagtgaggtatttcttccctcgcaatgttttttttttttttgtttgtttttgtttgtttttgagacaggatctcattctgtcgccctggctggggtgcagtggtgtgatcatggctcactgcagcctcgacctccaaggctcaagtgatcctcccacctcagcctcctgagtagctgggactgcaggtgcacagcaccacgtgtgcagctaattcaatttttttttttttttttaaagagatgggtttcacaccatgctgtccaggctggtcttgtattcctgggctcaagtgaccctcccacctcagcctcccgaagtgttgggattacaggcatcggccactacgcccagctgaaatatttcattgagtctcaaatgggggaattctggcccccactcccaaccccacccccaccccctgggggcacctggcaatgtccggagacatttttggttgtcacaacaggaggaacgggtggcgtgtgctgccagcatctggtggggggaggacagggatgctgccatacactgcagtgcacatgatggccccaccccaaagaatcagccacccccaaatgtcaacagtgctgagtttgagacgctcagggtcacctgatcccaggctggttcagagaagccttggagggaacaagccttcgacacagccacattccacagaaacccactcccctgaaaggaagccaggcttagggagcccagacggccctcacagtgtccacagactcaccagaaacgagcagaggaagatgaaggaaacaaagtaaaaataagcaaattcattgccacactctcgagtcaggatgccagagttcttatcacacggtttcccgctgaggcaggaaagcatgatgttgtgccaagcttccccggtggcactcctgaggacagggagaaatcagagactcggacacccagccctgactgggtaccaacgcctccccaggaggtggagcacacacgttgagcacttgggctctggagctggccaggcaagccccaggtggaccacctccttttactgggagctgagagaagggaattcacattcttggctgtgcactgaagtccacagagagctttgaaaaaataccaatgcccgtgccccaccccagcagacttggattcagttggtctagggtgggatttgaggacactgatatgtttttttcttttcttttccttctctctctctttcttttcctttcttttctctctctctctcttttttttttttgacagggtcttgctctgttacccaggttggagtgtagtggcacaatcactgctcactgcagcctcaacttcccaggctcaggtgatcctcccgcctcggcctcctgagtagctggggactacaggcacacgccaccactcctggctaatttttaaactatttttttttgtagagatggggtttcactgcattgctcaggctggtcactgttatgctttaaaagctcccctcttggctgggcgcggtggctcacacctgtaatcccagcactttgggaggctgaggtgggtggatcacgaggtcaggagattgagaccatcctggctaacatggtgaaaccctatctctactaaaaataccaaaaatttgctcggtgtggtggcgctcacctgtagtctcagctacttgggaggctgaggcaggaaaatcgcttgaacccaggaggcggaggttgcagtgagctgagatcgcgccactgcactccagcctgggtgacaaagagggagattctgtctcaaaaaaaagcaaaaaaaaaaaaaagctcccttcaggccgggtgcagtggctcatgcctgtaatcccagcactttgggtggctgaggcgggtggatcacctgaggtcaggagtttgagaacggcctgaccaacatggcaaaaccccgtctctactaaaaatacaaaaattagctgggcgtggtgacgggcacctataatctcagctactcgggaggctgaggcaggagaactgcttgaacctgggaggcagaagttgcgccgagccgagatcgcaccactgcactccagcctgggcaacaagaccgaaactctgtctcagattaaaaaaaaaaaaaagctcccctccatgaaggtgacagtcatctcatactatattctccctagatcactctgttctaggtatgctgggctcctcacagtcctcaaacatgccagccatactcctgcctcagggcctttacacaggcagtcccctcggcttggcctgcccttccccatatacccactgactccctcccttgccaatttctctcaaatgtcacactttcagagaggcataacctgccggccctctattctttttttgttgttagattaaaaacattattattttttactgtggcaaaatacacacagcatgaagtttatcaatttaaccattttgaagtgtacaattcagtagcattaagtaagctcacattattatgcaactatcaccactatctacctctgtaactttttttaaaaattaaaaaaatatatttttctttttagagacagagtctcgctctgttgccgaggctggagtgcagtggcacaatcatagcttactgtagcctggaactcctgggctcgagcaatcctcctgcctcagcctcccaagtagctgggactacaggtgtgtggcactatgcccagttaattaaaaacaatttttttgtagagacggggtctcactatgttgcccaggctggtctcaaactcctgggctaaagcgatcctcccacctcggcctcccaaaatgctaggattacaggcacgagtcactgcacctggccctattcccctttattcttgaattttatctttttccagcatcctctataatttgtttcctgattattcgtcttccccatggggatgttagcttccaaagtgcttaaaatgtctcttttctctatttcctggtgcatcctcgtttttcagccctgcctggcatgctgtaggtgctcaatacacctccacaagaggagcttgcagtgagccgagatggcgccactgcactccagcctgggcaacagagagagactccatctaaaaaaaaaaaaaaaaaagggctgggcacggtggctcacgcctgtaatcccagcactttgggaggccgaggcgggcggatcacgaggtcaggagatcgagaccatcctggctaacatggtgaaaccccgactctactaaaaatacaaaaaaattatctgggcgtggtggcgggcgcctgtagtcccagctactcgggaggctgaggcaggagaatggcgtgaacccgggaggcggagcttgcagtgagccgagatcgcgccactgtactccagcctggggaacagagcgagactccatctccaaaaaaaaaaaaaaaaaaaaaaaaagcccccccaaaaaacctacactgaacgagtgaaggaacttttgtgtgcagccaagatgatgaaccaaagaatcaagcctcacggtctgtaagcctgttttcttatttgtcggatagggctgccaagaatcccttcctcacagggtggtcaggaagattcagagataatgcctggaaaatgaccttgatgactatgtcccagggccctctgcttctgccctgctaggattcctgggccccccacgacacccatttccagcctcacgggaaaagaaggataagagcacatctggccacccccacaccagaaaaggaggaggagggcacgccccctatcggaagagaaggccggcacgtcccctaccggaagagaagggcacgccccctaccggaaaagaagggtgagggcgcgcccctgccagaagagaaggaggagggcacgtcttgcattggaagaggagggtacatcctctatgggaacagaaggatgaaggcaggcaccccaccccacggaaacagaattatcagagcaggtccccttctcaccggaagagaagcatgagggcctggaagaaggtccggaagttattgtgctcagtgatttggaactcatcttcatcactgtcctcgtcctccacgtcgatgccaatgttaccaaacacctgtggaattggagggtgacgaccaggggctgccattcctccagtggcttctgggaaacccagctcaacctccatggctgcttctgtgaaccaggctcctctgacccacccctttctaagggtggctgccctccttgggaggctctgggaaccttagggacacgacactcacctgcatcccaatgatggcatagatgaagaagagcatggcgatcagcagacagacataaggcagggcctggtgggaaaaaaggcaatgaagaagagtgctgggggtccctcagccgcactgtcttcctcccttgtcccagtgctctgccccactgggttgggtggccatatgccacgtgccagagtccttccagggctggtgggcatctctgggggctctaggatgaggcccttacagctctgaagacacaccagggacaggaagtttgacaacagccttggagataacagattctctgcacgactacatcacagaggcacttccaatctgacttctacattcagccagagcatgagggtcacctgtcttctcagccctgggccagcagcagggacgaggactcaccttgaaggactgcacaaaggtccagagaagaatgcggatggtgtaaccctgacggagaagtttgatgagccgggcagctcggaagaggcggagaaagctcaggttgatgaagttattctggggagatggaggaagaggggtgaccatccacccaccccaaaaggctcagagctgtcaccactcacagaggcccctacatgaagccaaccaacaggaaaaaagcaagccagaccccaaataaggagggagagagaaagcactattaatgcaatgatgcagaggaaaaactcgaaaaaggaataatgttgggagagagagggtgggagggaggaaaaggcatcaactcaaaagcataagccctccctgccagccccacccacaatggggaaaagaaaagaaaaagaaaggaggaaaaaggaacggggatggggaagaaataacaaaagaacaagaaaaagaaaatatatccgaatcatccaatcaggaaaaaaatcgagatggtttttgtttctcccaacaaccaaatgcactgagacgaaaggacacaagccggtcaagttgcggaatctatcatacgtgtacgatgcacaaacaccagggcgggggtgggggtggaggtcgccagcacagtcaggcctggtggacatgtgcgggttccgagggcatgttacgctccgggccagaaatgcatctgtcacgggactcaccgggcaccctgccctgccctgccctgccgagctgcccacccgctcctgcccgccctgacctcaccccacggccaagaggagcagcggctcgagccaattgggagaagcggaagagcatcttttcttacccccttggcgagcgggaatggggaggacgggagggagctgggactgttcggctgcagggtgagtcctcgctgcccgctgagtcggagaagatgcatttggggcccttttcccccctctcagggatggcttctcagcttctggggctgggtggagtagcacgggaccaggcctgcaggaagcaggaagcactcagctcccatgggtgggtgagctcagaaatcagcccgggcccaccaaggggcgggtgctgggggccgggaggtggggccatccctgcccccaggacctccctgggtggccactgcctctgctcaaaaaccccctgtctagtcactgcctctgcctcctcccacccaagctagaagaaccagggggccagagagttggagagtcagggaggagaccagctagagttaagtggccattgtggggcttcaagggaccttggtggggggggtgggactctcgaagtcacgagtgggccaaatctagctaataaaactgttttgttgggcccgagcagtgttttttcatttgtccttgtttttaattaaaaattattgccattgtttaaaaatcaagagattttgcccaccaatctggctttctggcaaccccaggcctgctgcgattgctccctggaagcaggccacatgatctccagttttccagggtcctcacgttttagaaatggcacttgctttcctggttgactggtgtctgcctggcccccagaggcatttgagtttgagaccccagcctcaggcagacatggaaaccctccttcgctggccagtacccagcagggtgaaggcaggaggagtagagggtctctccacactaagggaaggggcttaatcagacttgttctatgggatttgtaggatttgctacaggccacgtagcaagatttaacttggtctaaccttcaccccccaaatggcacagggtgaccatacagtcacagcctccctcctgtttcaaaagtgtcctagtttgggtgacatgggcatcctacttggtggcttccagagggctttctggctgccagatctgtgtcttgtgctggctttggcctgggagctgagaggcaaggactggagttcaaggaatttctgaggcctctgggtttgatggcaatgtctaggatgctctctgggacacatcagtgcgtccttaggcctctaggatggggaagggggctgggggatcctaccctgaccacactgggctcaagtgctgtgagaatgtctccagtgcctcgaacaagccccaaacccagcttggctaacagagtcactctctgtgccctgctgccctgacccccatccctgcctggccacccagctccacctggggatggggccgatggctcaggtatccccagccccctcccgttcaaccccagagtacaagccatccctttcatggggcggatcataacatgtggactcggccaggcatgcgaaggcaggcggaccctggaagcagcctcaggaggggggtttggaggagagcaggggaagcttgcaaccatgcaaaaaagccagggatctggcagggagatgcgtgcagaaaacatgcttcccttcttggagccaagtgggggaggagacacatgaggcaggtaggggtggagacgggaagggtttggggcagtgggggaagggtactagtctgccctcatccaccctccatctcttcctgcatcagtaccaattctttccactgcccccagaacttctgacaagttccctcttcctgccttccacatttcaatccatggcttgggaggtgcagcttcctctcttcaacacctcccctgaacttcctggctagaatgtgatgggggtgggacacagcccctggaagacatgaggacagcgtccttgtggtcttttcttttccagtgctgtgctcagatgttcctcaagtgctcagaaggatatggagaccacccacctaagggctccagaaaagtcctactacttgtagacctcagctccaagctgcagcccccacaacacctgcctatctgacttatttcgggatgtcctaaaggcacctcaaacttgctatgcccacacctattctcttcccccaacctggtcctttccttgcactcgctcacctctatcacccagtattttttttttaagagagtctcactctgttgcccaggctggagtgcaatggcacgacctcggctcactgcaacctccacctcccaggtttaagtgattctcctgtctcggcctcctgaggatctgggattacaggcacctgccaccacgcctggctaatttttgtattttttaggagagatggggtttcaccatgttggtcaggctggtctcgaactcctgacctcaggtgatcttcctgcctcagcctcccaaagtgctgggattagaggcttgagtcaccgtgctcagcctatctcccagttttaagccagacccgactgctcccaggcacctcatctcagttcagacctgatctttccctgggtcctgcagaggacaaccctcccactgttctctctcctccactgtcatctcttgctgcgattcctggtgcccacctccagcccagcctcctgtcaagctgttccctgccctgcaaccagagcgagcttgtctagtcacatgaccagtcgcgcctcccctgcttcctatcctcccaggcccttcctggtgcttaggagaaagcccatattccacaatatagccccgccctccccagccccgggtcctgtccccttctgccttcttcggctgtctccaggccagcctttctcggctgtctttgcatcagccacattccctcgcttgcagatcctgacccctcacaggttccgtcccaccacagggcctttgcatgtgctgtcctgggcctggaatgctctgtgcatctctctctgccttgttaatgctgctcatccttcagctcgcagtgcaggtataattttaagtggagtcaaggggttatttgaccgatgcctgcctcccccacctgactgtatgtggtaagaggggacagtaatggtgtctgcttctgcccataattccatctgtggcaccaaataggggctcattaaatgtttggtgggtgaatgcatgtgtattgccagcagggaagggatgattccagggcaaagatgccattggggcgtccctctaagggcctcattggtgggtaggagaggggcagaggcagttgagatttaacagaacaaggggtgtgcaaggggctgagaagtgggggagggagagagatgtgtgcagtatgtactggagtgggggtacagggtgggtagatgtagcagagagggccagtgtgtgtgtgtgtgcatgcgtgcatgcatgcatgactgtatgtgagagacacagagacaggaacagtgaatgaggattagaggccaggtgtagtggctcacacctgtaatcccaacactttgggaggctgaggcgggtgcatcacttgaggtcaggagttcgagaccagcctggccaacatggtgaaaccctgtctctactaaaaatacaagaagtggcctggcgtggtggtacatgcttgtaatcccaggtactcaggaggctgaggcatcataattgcttgaaacggggaggcagaggttgcagttagctgacattgtgccactgcacgccagcctgggtgacagagcgagactctgtctaaaaaaaaaaaaaaaaaagagcgagagagagagagaattggagaatgagtgagaaaaagagaagaggtcatgactatgtgcagtgtctgtacatgcagtgactgtgtgttcagtgtgtgggtgcatagactgtgtgtgcagtgactgtgtgtgtatagcgactgtgtgttcaatgtgtgaatgcagactgtgtgtgcatgcatagtggctctgtgtgcagtgactgtgtgtgcagtgtgtgtgcatagtgactgtgtgcagtgactgtgtttgcatagtgacagtgtgtgcagtgtatgtgtgcacagtgactgtgcagtgtgtgtccatagtgactacatgcagtgccagtgtgtgtacatagtgactgtgcacagtgtgtgtgcatagtggtgtgtgcagtgtgtgcatagtgactgtgtgtccagtttctgcgtgcagtgactgtgtgtgcgcagtgattgtgtgtgtgcagtgtgtgtgcagtgtctgcgcagtgactgtgtgtgtggatagtgactgtgtgtgcagtgtctgtgtgcagtgactgtgtgtgcatagtgactgtgtgcagtgactgcagtgactgcgtgcagcgtctgtgtgcagtgactgtgtgcacagtgtgtgcgcagtgactgagtgtgtgcacagtgactgtgtgtgcagtgtctgtgtgcagtgactgtgtgactgcgtgtgcacgtacagttcaaggctccaggagagggcctcagtgggccagccccacatgaagctaccagatccaagtctggcacttctgagttcctctgcctgagagtctttgccggcacactgcctggccttcaggtctcctttatcagacttggagagtcaagtctctgctggtcaaggccaaagatcttgtgggcttgagatggaggattggggacagcaggatggagagagctggaggggcgaggagacagttggcagctttcctggggcctggggtccatggagctgaatgggggacaggagtggtgagaggtggctgggagtggatttgcctctattgtctctgagtgtaggggatgtgtgtgcgggatggggcaagagagaggtgctgcgctgggaaaacccatccctttctctgcaaaagacgcaaaccaccccaaacagaaaacccccattcagaacccgataaaaacagagagacagagtctacaggaagtgggaggcacaggggctgggggcgggaggacagacagacagaggagagcggagggttgaggagagcgtcaggcatcccacgttggagaggcagggtgtggcatgcaatgccgacgcgaggagatgcgttcacagttaatgtaaggcatttagacttcagaaagaagtaagaccaaccggattctagatgcagatgttgaagatgagggggagcgggcgggcgggggcagttggggaggcgtgttcagcattttttaggttgatttgtaaccagtgccaaaaaaccaatgggtttcggttcccgggcggggagtgggggtggtggtggcggtgggttgggagataagtcattggtgtatgaacacacagaccatgtcatggatgaacaaatgaatttcatagtgcattttgattggatgagtttttcagacggcgttgcgccaatatacagttttaagagcaggcatgaaaagagacaagacaagaaacacagtcattatccattgcacacagggcaaacccacatcaccccagccacttgggggcagcagctgagacagcactggttagtactgccgcatgccctctgccccctaaaccccagggacctgcccgcccaagcatctggcatttcctgtctcagcctggccaagccctggcctcagaactagtgggcttacctgggaggcagaaaggggcaactgagacctccttgcctgccaggacatgcctctccctactccaggttgggagttaattgtcccagaaggacccaaacacccaccccctatctttccctcaaattgactgtaactcagggctggctaacaaaactacacacccattcacaataacaataacaacagcagtaatagttaacaaccaccattttcaaactcctggtttcctggcaggttctgtgccaagcacttcacgtttctttctttctttttcttccttttctttttgagacagagtttcactctgtcgcccaggctggagggcagtggcacaatcttggcttactacaacctctcgcctcctgagaatcaagtgattctcttgcctcagcctcctgagtagctgggattacaggcacctgccaccgtgcccggctaatttttgtatttttagtagggacagagtttcaccatgttggccaggctggtctcgaactcctgacctcaagtgatccacctgccttggtctcccaaagtgctgagattacaggcgtgagccaccatgcccggcctgttgatgcttttacttgtaaaaagttcccgtctctctccttagaatgtcagctctatgggagcagacactctgtattcttggtctgttttgtttggcacccctccttctcgttctgtctccagcacttataatcacaccaggcacacagtaggtgctcaatgaatgtcttttgagtgcatgcatcactgtgagtcttgcaagtgtctgaggttggttgcaatggttagccccactctacatgagaagagatagcgcaagttgtccaagatcaaacagctggtagggagggctgggggctgtttggctactgcaagggtcctgatgtcccatgaacaccccatgccccatcttcctgccagccaggagaacaggctgttggagtctgtccctacagctctcttactggtgattgaaggtttcagctaacttcctccaccccacctgcccttctggggagctggaccatccttctaacctcttgacccaaagggacattggttcaaggctgtcttgtatgtagccggatggcaagatattttgattgccagctggagctccagccctctctagaaactcaggacaggggagaatgaccaggtgggggcaccccagtggagagagcccccatgtgggcaagaaccctctagaggaaggtttcagggatagggtgaggggaaggggaaaattctggctcactggagctgaaggcaaataagtgtgtatcacttgggtgcgggtgccgtaggacatatcaaagaatggccccctcttttgtgtagttccccagcccctcctggccttctaggacggaagagcaggcaaacagatccttttctgtagggggatctgactgggacaccccaggagctgtcagtgtactctcaggagtcacccaggcctggctttgtgaccttgggagtgtctctcacttccccaggcattgaagatcagttttctttctttctttttttttttgagatggagttttcgctcttgtcacccaggctggagtgcaatggtatgaccgtcgctcactgcaacctccgccttccgggttcaagcaattttcctgcctcagcctcccgagtagctgggattacaggcatgcaccaccacacctggctaatttttttgtattgtcagtagagatggggtttcaccatgttggccaggctggtcttgaactcctggcctcaggtgatccgccggcttcggcctcccaaagtgctgggattacaggcatgagccaccgtgcccagctgaggtcagttttcccatctgtgaaatgaggcaacaccctcttcctcaggcccgaccacacccagatctattctcctgacttccctgcctgctctgagcatcatattcagcttgcttccggtttactttgggccatgggaggctctggcaggagataagggatgaggggagagaaaggttggggtgtttctcccctattgctctctgcctgcttgggccctggtctctgtctctccacattgacaggacagctcccacttggtggcttctcctggcctccggctcaggttccctccccacttcagcacctgggcaggtgacagctccccacggtgggtggtcgctggacaccttgccacccttgtgggtacccttcccttcccctccaccagtgaggtctgcatttgggtgccttcagttgaaccctccgagggaattctcttacgagctgagaccaagacctctaccctgagccaatccacgtaaaccacttggcacagttccctggcacacagcaaggctgcgattctcgtgagctattgttatttttattgttagtaagatgacattggtatcacccttgacccttggctttgacacccttttttgaccattgcttccccctgcaaggatcttctaccctccccccaatctcctgagggaccccaagcctgggctcattggcagatggccaaggagagggtctaggacaggacctctggggccctgagtcttccagaaaaggagaagggcaatgtggcctgtggggccaccacagagaggtccagagactcccatgttgagagtctcccaggcccggggctagaggagggaagacaccctggggacccctctatggccctgggagtggtgtccccacactggcctgagggctgtggctctctcctgcccactaactaggagagggttggttcaaacagaattgacttgaaacccattctttctgggctcctgacatagggtggtgtttgggagccggctcagctttcagagcttttgagtgtctcagttccctcagtgtactcatctgcattattaattcctaggccaggatgcaggaaagcccacccctcagtgctggccctacagccaagctttggttacccccatctccccacaatgccctcctgaggggctgcccttgtccccggggccccagttctccctctctggtcatggccaagtgctggctcaagcagctatggcttccgggacacactgcctctgggaccgctcccccgccccctgccgcctgcctcgtccagcccagagtcacccagagagaagctggagggagacttaccccaaactcagtcacgaggatatcggtgatgctgcccagaacagtcacaaagtcgaagatgttccaggcatcgcggaaataattctagaatggggacccacaagacagagatgccaacagagggcttggttcccggccccctaggctggccgggtgcatgttagaggcacagttgcccatcagcggagtgcccgggacagttatggttgttcgaagggctgcggtaaaggctgttcgacatcatctgtgctgagtctccctccctgggaactcctgggggccttcccatgattggcctggccccagagggggcctccagaccctgcttcagctccacagggctggggctgctcttcagagctgtggcctgtctctccagcatttttgagggctcccgagaccccaggggctttataaatgacatcactgagctcctcatgaagatcctggagggaagggttatcacccattttctttttctttctttctcttttttttttttttttttgagatggagtctcgctcagtcatccaggctggagtgcagtggcacgatctcggctcactgtaacctctgcctcctgggttcaagcgattctcctgcctcagcctcccaagtaggtaggaccacaggtgcatgccaccacacccagctaatttttgtatttttagtagagacggggtttcaccatgttggtcaggctggtctcgaacttctgacctcaagtgatctgctcactttggccttccaaagtgttgggattataggcgtgagccaccactcccaggtatacccattttctaggaggtaaccaagccactcatctgcctgaggctagcagcacagagatgtaaagccaggatttgaacccaggcctcagagagcccacagtctgtgttcaggtccccactaggttggcagcatactcgcaaagaaaggagactctgggttcaaatcccagctctgctaccacagctgtgtggctatgggcaagtggcttaacctctctgggcctccatttcctgatctggaggcggacagtaacagggtgcagaacaggcactggacggggctttggggcctttcaggcacacgcacttcctggtccccttgtgtttagatggggccatgtgtgtctaggtgcagtgatgtgctgtgtgtggaagcagtgtggtcactttctggtcagtgttggactctctagcctctcaaccctgggcttggcgaccagtaacattttgaatggcagctactctgtgagcctgggtccctgggtaactatgaggcaaacagcttccctgctgaatgtaaaaaacccttcccatcaatttaagtcactgagatgtgggggctgtttgttactgcagcttcacttgatctatcctgactgctgcattcctgggctgggtgctggctcaaggggaaacacaagcataacctctctgtttgttttttttttttgagacagagtctcactctgtcgcccaggctggagtgcagtggcacgttctcggctcactacaagctctgcctcccgggttcacaccattctcctgcttcagtctcctgagtagctgggactacaggcgcccaccaccacgcctggctaattttttgtattttttagtagagacggggtttcaccatgttagccaggatgatcttgatctcctgacgttgtgatccatccgcctcggcctcccaaagtgctgggattacaggcgtgagccaccacgcctggcctctcttttgttaaaatatggaaatactccacattgtttggagaacagtcacagcctcaagtcccacaaggtctcctgctatctctgactcccctcaaccgggtactgacatggtgatgggtggcaccccagtttggatccaagagtctgggtcaaagagatggccctcccctctggggtcagtgggacccaaaacacaaaacacagggccttctcagcatcttcgcagaagcagaggccaggtcaggggttggggcggtcagtgtgaccctgaagtagcccctctaccttacagagaaggagcctgaccttagagctgtgcttccctcctaggcgaagtgcctggggcctctgcgcccttctctggaaggcagtggtaacacagcaatcagacaatgaatgtgcgtcgctgagcatggaatatacagtaggtgcccaacagatgggatgttgttgtttcacaactgcctaaaaaaggaattcagggggccgggcgcggtggctcacgcctgcaatcccagcactttgggaggccgatgtgggcggatcacgaggtcaggagatcaagaccatcctggataacatggtgaatccccatctctactaaaaatacacgcacacaaaaatcaggcaggcgtggtggtgcgcgcctgtagtcccagctactccggaggctgaggcaggagaatggcgtgaacctgggaggcagagcttgcagtgagcagagattgcaccactgcactccagcctgggccacagagcgagactccgtcaaaaataaataaataaaaataaataaataaataaataaataaataaaaaggaattcaggtcccactggcacttttggcattttggcaggtgttgctggggccctgcccatagctcaactacacacctgaggtacactactttgcccagggtctctctgtggctgcacaagtgttagggaattaatagctcccctgggagtggcctgtgattatgtctgatgggcactggaggataaatactccaattccctccctgtgaggtgggatgactctgtggtatgtgctctctgttgcctcctggaggtatccactgaaactgagccccatttgttcacagcaggaactggcttaataatacactctttcctggttgcctttctgtccctgtgtcacttcctctctcccttactgccctgcatcccagataaattccttgcactcaatccttgtctcaggctctgcttctgggggagtccaaacaaagacaactttataggcgtttggtcacagacctcaacccctaggctagagagctcccctctatctcccaaatgttatacagggaacttgtggcttcatttaaaactgaaaggggagaccaggcgtggtggctcatgcctataattccagcactttgggaggccaaggagggagaactgcttgaggccacgagttcaagaacaggctgggcaacagagtaagatcccatctcaaaaaaaaaaaaaaaaaaaaaaaagagaaagcagaggggaagctcagtgctggctcttgcaggattggcagggtgagggagatgcagctccaggccccagtggaagactcacttcaccagcagaagatcaactcagaataaaataactgcaggctaggtacggtggctcatgcctataatcccagcactttgggaggccgaggcaggcggatcacctgaggtcaggagttggagaccaacctggctgacgtggtgaatccccgtctctgctaaaaatacaaaaattagccgggcgtgatggtgggcgcctgtaatcccaactagtcgggaggctgaggcaggacaattgcttgaacccgggaagcagaggttgcagtgagccaagattgcaccactgcactccagcctgggcaacagagtgagaatccatctcaaaaaaaaaaaaataataataaattacagattcagtgattccctcccacctcaccaaaccaaatgaatcagaacatctaggggtttgctcagggtatcatttaattttaagaaatttccctaagtgcttcttttttgatttttagagtccgggtcttgtgttgttgctcaggctggagggcagtgatgtgatcgcagctcactgcagccttgaactcctgagctcaagtaatcctcctgccttcgcctaagtagttaggacaacagtcatgtgccactatgctggctaatttttcaatgttttctagagatgaggtcttgctatgttgcccaggctggtctgaaacgcctgggttcaagcaattcttctgccttggcagaagtcccaaagtgctgggactacaggcatgagccaccacacctggcctcaagtgcttctaataagtagcatctccaccaaatgaaagccactgttttggaggaaaaaggtccattagtaggatccctttcctagcatttatttatttattttgatacagggtcttgctctgtcacccagggtggggtgcagcggctcaatcacgactcactgcagccctgacatcctgggctgaatccatcctctcacctcagcctcctaagtagatgggactgcaggtgcacgccaccacaccaggctaattttgtactttttgtagagacagaatctcactatgttgtccaggttggtctcagactcctgggctcaagcgatccacctgcctcagcctcccaaagtgctgcgattacaggtgtcagccaccgtgcctggcccctagcatttattgagtgcccatgccaggccaggcttcatcctcaaccctctagatgcacgttagtccatttgctgtttaccagggctctgctgaggtggagggggaggatggctccttttaatgatggggaggtgacaaagcttatataggacgaggcaagatctgaactctggtgctaaagctgatgcccctaaccacctccgtgagccaaggtgggaacctggtttcctgagaccctggctgagacccagactgtaggtcactctcttcaaagggatggactaagctggtggtcaagagaacagatgtcctggttcaagtcccaccttggccactcactggggaccttcaagaattcacttcacttcaagtcccagcccactagtataagccttcttcaccttaatttttttttttttttgagacaaagtctcactctgtcacccaggctggagtgcactggtgccatcttggctcactgcaacctccgcctcacaggttcaagcgatgcttgggcctcagcctcacgagtagctgggattacaggcacacgccaccatgcctggctaatttttgtatttttagtagagacggggtttcaccatgttgtccaggctggtcttgaactcctgacctcaagggatctgccctcctcaagctcccaaactgccgggattacaggtgtgagccatcacactcagcccccaattttttaaaaaataattttaatttaatttaatttaatttatttatttattgagatggagtctcactctgtcacccaggctggagtgcagtggcaagatctcggctcactgcaacctccgcctcccacgttcaaatgattctcctgcctcagcctcccgagtagctgagactacaggcatgcgccaccacacccagctaatttttgtactttttagtagagatggggtttcaccatgttggcaagggtggtctggatctcttgacctcatgatccacccacctctgtctcccaaagtgttgggattacaggtgtgagccaccgcactcagccaactatacttttgtgtgtgtgctatgaaccttggccatgtgagaatagtgctggctattttattttatgcataaaggcttgtaaatgcataacaaaatagcaagggcttcaaggttaccttttgtaataaaatagctatcaaaatattttttaaggctaggcacagtgtctcatgcctgtaatcccagcattttgggaggctgaagcaggcagattgcttgatgccaggagttcgagaccagcctggccaacatggtgaaaccccgtctctactaaaaatataaaaattagcctggcatgctggtgtgcatctgtagtcccagctactcagaaggctgagatgggagaatcgcttgaacccaggaggtggaggtttcagtgagccaagattgtgccacggtactccagcttgggcaacagagcaagactgtgtctcaaaaaaaaaaaaaaagttttaaaaatggcgatctaacaatgaatatacttctccattaacacactgagtaggccgggtgcggtggctcccgcctgtaatcccagcactttgggaggccgaggcgggcggatcatgaggtcaggaaatcaagaccatcctggccaacatggtgaaaccccatctctactaaaaatacaaacaattagccaggtgtggtggcaggcacctgtagtcccagctactcgggaggctgaggcaggagaatggcgtgaacccagggggtggagctttcagtgagccgagattgcgccactgcactccagcctgggcaacagcgagactgtctcaaacaaaacaaaacagaacaacaacaaaaaaacactgagtaacaaattctagctgtaggtttaatcacaagcaacattttaaagcaatgatgaatgcaaattaaatgttaaggtatctgcagctcttataatgcagtatgaaaatatctgatgtttataagtgacacaggtcatgttgataatattaagggttgataatactaatactaagggtttgttatctccctttaagatggaaggaaatgttaaaatttagttagtggctggtgaaaaataaagacatatttatttttattattattatttttttgagacttgctctgttgctcaggctggagtgcagtggtgtgatctcagctcactgtaacctccactttgtgggttcaagcgattctcctgcctcagcctcctgagtagctgggatcatgggcacccacaagcacgccaggctaattttttgtagttttagtagagatggggttttgccatgttggccagggtggtctcgaactcctaggctcaagtgatttgcctgcctctgcctcccaaagtgctgggattacaggtgtgagtcactgtgcctgacctctgtgtttgttttttaaagatggagtcttgctgttgcccaggctggggtgcagtggcatgatcatagctcactgcaacctccacctcctgggctcaaaatatcttcccacctcagcctcctgagtaactggcactacaggcacgagttaccatgcctggctaattaaaaaaaaattttttttttttttgtagggacaggggcttgctttgctgcccaggctggttgagaactcctagcttcaagcgatcctcctgccttggcctcctgaagtgctaggattacaggcatgagccactgtgctcagcctgatttcagttttctttctttctttcttttttttgagacagagtttcactcttgttgcccaggctggagtgcagtgatgtgatctcggctcaccacaacctctgcctcccaggttcaagcgattctcctgcctcagcctcccgagtagctgggattacaggcatgcgccaccacacccggctaattttgtatttttagtagagacagagtttctccatgttggtcaggctggtctcgaactcccgacctcaggtgatccgcccaccttggcctcccaaagtgctggaattacagccatgagacacctcgcccagcctgatttcagttttcttatctctaaaatggatgctaaagactcccagccatgatgactcccatcattttgaggaactggatacataagcagccatatggtaacactcacaggttgggtctccctgggactccttggcaaacacaagaatgcctaagtaggatctgtggccactggcaggatactgaagccacccttgaggttggggttcttggggccacgttgggagaccatcatccaggacccattgttcccccttgggcttctcccaagcccatagctgtagccccaaggtggtacttaccagaatcccaaaagccatgactttcagcacacattccagagagaagagggaggtgaagacgatgttgaacacccgcagggcattttcataagcaacagaagccccatagaactaggggaaagaagcaggagtagcaggggtcagcgagcaggggtgggaagtgggaagtggggaggcagcttcatggctgttctccaggcaacactccagccccaggcaaggtctgagcaacctcactggtaggaggcacagttcaggaaagccccgctctccgccggactaggctcttcttttcacatccaaaaaaacaaaaacctcccccaaccttttttttttttttttggtagacggggtcttcctattttgcccaggctgggcttgaactcacaatcctaccttagcctcctgatagtcgggactataggcatacgccattgtgcttggctgaattatactttttttttttttttttttttgaggagtctcactctgtcacccgggctggagtgcagtggcgcgatctcggctcactgcaagctccacctcctgggttcatgccattcccctgcctcagcctcccaagtagctgggactacaggtgcccaccaccatgcccagctaactttttgtatttttagtagagacagcgtttcaccgtgttagccaggatggtcttgatctcctaaccttgtgatcgccctcctcggcctcccaaagtgctgggattacaggcgtgagccaccgtccccggcttccttattttttttgagacggagtctcactctgttacccaggctggagtgcagtggtgtgatctcagctcactgcaacttccgccccctgggttcaagcgattctcatgcctcagcctctcacgcagctggtattataggcatgcgccaccacgcccagctaatttttgtatttttagtagagacgggatttcaccatgttggccagttggtcccgaacacctggcctcaagtgatccgcctgcctcgacctcccaaagtgctgggattacaggtgtgagccaccttgcccggccactattgatcgtttttgaagtgccgagaaggagctaaggtccttgcatgaactttctcattcaatcctctcacctcctctggagggggcaaatgtgctcttattatcattcccattttattgacagggaaactgagtccccagaaagtcactggttgcttgtacaaaggtaaatgaattaaatggaagagctgggcttgaatccacgctttggagtccaaagcacagggtgaaaggttttcagagtttttttttggaagccgctccttagccctggggattttagggtcctcacctaccccttctccctcatttctttctttttcttttctttttttttttgagatggagtcttgctcttgttgcccaggctagagtgcaattgcgctatctcggctcatggcaacctccgcctcccgggttcaagcaattctcctgcctcagcctcccgagtagctgggattacagatgcgcaccaccacgcctggctaattttgtatttttagtagagatgcggtttctccgtgttggtcaggctggtctcgaactcgtgacctcaggtgatccgcccgcctcggcctcccaaagttctgggattacaggcatgagccaccgcgcccagccccctcatttcattaatcaaacatttatagagagcttcttgttccgtctgagccagatccttgttggcctctaggaattcagggctgaggtcatcataaatgggtgggggacactgtcatgcaacctgacgcagatttttgtggcaggcgacataaagataggatgcctgctaagatgggcacctcaagcagtcttgggtggtcagggaaggctttctggaggaagaggtctgcaggtacagctgggaagaagaagctggccgggggagtggtgggaacagtgtgtcaggtagagggaacagcaggaacaaaatctcagaggtgatccagagtgtggtctgtctgggaaactgcagatggtttcattttatcagggtagaggcaggaacgaggtgggggttaagtagtgctgggggctggtgtggggcacttaccttcatcataagcacgatggtgttgagggcgatcatggccatgatcgtgtactcgaaaggcggagacaccacgaactgccacatgcggtactggaagctctgcttgttctgcggcatgtgtcgggtcagcggcttggcgctgatggcgaaatcaatgcaggccctctgcgggagagaggccagtggtgagagcggcagaggcaggaggaaggtggctgtacaccgggcaccctctgtctaactcgtcgcggttctcaagtgcttctgcttgagtctctgcctctcttgcccccagccaggattcctgggctctctcttccttctcaccattgctttcttatcccaacagctacagttgcttgagatgtcaccaactgccaaaacttgcactgacatttccccattattgcatggctaatacaaacatgggaagtgggtactatcaatggcctcactttgcagatcaccaaaatagaggcttagaaaggttaaaccacttgcctgaggtgacacagctaccgagtgtgccaaatcaaattgaagcctaatccttcttccccttcctccctccctcgctccctccctccttccttccttcctccctccttccttccctccctccctccttctctccctccctccttccctccctccctccttccctccctccttccctccctcctttccttccttcctccctccctccttcactttcctttttccttccttcccttcattccttccaccctttcccctttctcctttcctttctctcttcttccttctttccttcgctccctttctttcttcttcattccttcttccctatctccttccttccctccctcctttctttctctctctcatttccttccttccctccctccctccctccttcctttttttttttttttctttgacacgggcttgctttgtcacccaggctggagtgcagtgcaatcacagctcactgcagccttgacctcctggactcaagtgatcctcccgcttcagcctcctgagtagctgggactacaggcgtgcaccaccacacccagctaattaaaactttttttttttaatcatagagatggggtctcactatgttgctcaggctggtcttgaacttccgggctcaagcaatcctcctgccttggcctcctaaagtgttaagattacaggcgtgagccactgcgcccagcccattctttcttactgaatactttgctgcgtcttctccttctctttgagggagagagaaggaggaatagtggttattaagtcttaagggtcaagggagcagaggatatattctaggtcctctatttagcttggatgatgccagagaggcaaagagtcatgtctatactctctggtagacaggggactggattttctttccttttctttttttgagagagggtcttgctctgttgcccaggctgtagtgcagtggcataatgatagctcactgcagcctcgaactcccaagctcaagcatcctcccacctcagcctcccatgttactggggctaaaggtgtgcaccatcctgcctggctaatttttttgatttgtagtagagatggggtcttgctatgttggccaggctggtctcaaactcctgagctcaagtgatcctcctgcctcagcttcccaaaatgttgggattacaggtgtgagccaccacacctggcttggcttttcattcataaatattcaccacccttcgctaggggagattgtatttgcccactccactgatgtcagaatggatgtgtgacttgctttggctgatgaaatgtgagcagaagtgacatgtgtaatttttgagcacaagcctgaagaactgaacctcagtctgacatactctctttttcatctggagcatctcagagggaggctgctctgctgctctgccagcctgggaaccagaataaagatggcaagatccacaactgatgttgacatgcagtgtgagcaaaaaataagtccctttgtggatatttggcaatgaaatctggggttgcttgttactgcggcataacctagtctaaactgactgatacatacactatatgatgtgtttcctctggaaactccatgaagggctgccctgaagactggattcggttgggacaatgcttctgttccctcccccaggtacccctagaaaggggttcctgggtgttgtgtgtgttttaaagtttgtgtgtgtccccagtttttaaaggacagatggaattggaagtggcacctcatttttctccaggctgtattcctccatcatcttgtccccttgctcctggaaggtgatgatgatcaaggccacaaagatattgacaaagaagaaggggaacaccacaaagtagacgacgtagaaaatggacatctccatgcggtacccggggctggggccctggttctcaaaggtggcgtccaccgaatgcttgaggaccctgcaaggaatggggcagggagagggaaggggcaggaaggagagagacagggacccaaggggtgatgaggaaggtggagagagggtggaagtgagatggcagaacaggaacagagggaaatgaaaaagaaatttaagtagtcgctgttttttgaaaggctgacaacaatgtcagttatttcttaattttaattttaattttttgagatggagtttcgctctcgttgcccaggctggagtgcaacggcgtgatcttgggtcactacaacctccgcctcccgggttcaaatgattctcctgcctcagcctcccaagtagctgggattacagacatgcgccaccaagcctggctaatttttttgtatttttagtagagacggggtttcaccatgttggccaggctggtcttgaactcctgacctcaggtgatccacctgcctcggtctcccaaactgttgagattacaggtgtgagccaccacgcctggccaatgtcagtcatttctactgctgtgcatgaagggcttgctgtgtgctggaaacaatattcaacaattcatccccaccggctcagcaaccctcccagggaggttattactggctccactttgcacatgaggaacttgaggttcagcaatttaaagggacgtgctgaagaccacccacttataagtggccaagttgggatttaaagacaggttgtggcaatggagggagtagaggtgggtgtatgcatgtagagtgggtatttgagcacaggtggtgctgggtgctcaggaggtacaatggggatatatatgagagtgggtaagtgcacagcagctctgtacagtagtgcaggttgcacactgctcaaaggctctgtgtctaagcgataccttcacatgataggcatgatagatttgtgtattcatgatgacaattttttggcaggtggtccttcagtgccttgtttgaacaaaatcatttaagtctattgcgatgattttcagacagatggaaatgaagtctgttgagaaaggtgtttaaaaaaactttgctcaaaggtgccttgtgggttagcattattcccacatgtgtgagtactggatgtgtctgagagtgggtagtagggcatgttcaggttggcatatttgctgagagagggagggaggtgaggatgctgagggcacatgctggaatctaccaagcttccagcctggcatttccaagacctctgagagaaagaccattacttggacgaggtgagggagggaggcatttgttttgggtgcaaattaagggggtactgaaaatctcagtaatcaagataatcttttgctccaatattttaaaaaatcaaaattaatgcaaaaagtccatgatgaacaaatatcaatttcttcttctttttttttttcagggataggggtctccttctgttgtctaggctggagtacaatggcataatcacagctcactgcagccttgaactcttgggctcaagcgatcctcccacctcagcctcctgagtagctgggataacaggtatgagccaccacaagtggctcaaaattttaaataaagactaagtccatgattcagcctcacttttttttttttttgaaggcggggaggccatagtcttgctctgtcactcaggatgaagtgcagtggtgcaatctcggctcactgcaacctctgcctcctgggttcaagtgattctcgtgtctcagcctcctgagtagccgggaccacaggtgtgagccaccatgcctggcagcttttttttttttttttttttttttttttttgggatttttagtagaaatggagttttgccatgatggccaggctgatctcaaactcctggcctcaagtgatacatctgccttggcctcctaaagtgttgggattacaggcgtgagccaccatgcccggcctccaagacctttcttattgctaagctctcaggccctttatcctcctgctccccagggctcctcctggatagatttccagtcgggccacttactgtggccagccttctcccgtggacacggtgaagagggtcagcagagcccacagcacattgtcgtaatggaattcatacttcttccactcccggtctcgcgccttcacctcattcttctcgtagaggaggtatttgcctctgccacagagagtggggactgttagtaaatgggaaagaggggctgtcttgcacttgtctttggttatcagagacagggggagggaaaggaagagtggtccaccagcctagactgcttgggaagcagtgactccccatcctgccaccatgtgttcctgtgcttcataggggatgacgtgtgcatctactttgagataaatccatgggtgatggcacaaccttactcctggtgggagagctgacccagggtccagcaccctcttccaacgtgataacttctagtcctcagggtgagagcctcaggcttgctgggggtggggtggagggagtttaggaggaggcagagagacataggggacatttagaggttcatcaggctaagggaggttgctactccttttcaaggcaggaaacaagggttagttccagactcctatccagacatctggcatcctcctaatttcaataaatagccatcaagataacaacaggctaccatgtgttgcaaaatgccactttacactggtaacaatatcactatatatacacatacatatatatacacacacacatataatacatatgtgtgtgtgcgtgtacatatatatatatacatatatatatatatatatttttgttgttgttgtttgtttgtttgtttgtttgagatggagtctggctctgttgcccagactggagtacagtggcccaatctgggctcactgcaagctccgcctcccgggttcacgccattctcctgtctcagcctcccaagtagctgggactacaggcgtctgccaccatgcccagctaggtttttgtatttttagtagagacagggtttcaccgtgttagccaggatggtctcgatctcctgacctcatgatccgcccgcctcggcctcctaaagtgctgagattataagcatgagccactgcgcccggcctatatgtatatatttttgagaggcagggtctcactctgtcacgcaggctggagtgcagtggtaccatcatagtgcattgcagccttgaactcctgtgtttaaacaatcctcccgcctcagcctcccgggtagctgggactacaggtgtgtgctaccatgccccgctaacttttaaaatttattttgtaggatgggctctcattatgttgcccaacctggtctccaactcctggcctcaagtgatcctcccacctcagcctcccaaagtgttggaattacaggtgtgagccactgcacctggcctcttacctaacttatttggtaatgaaacctgatctgattggacatgaagctctttatacttgttatttaccccatttgatgtaaatagttacacattttatggcagaaatattgtgtttgattatagggctgccttagacccagctgagggtgtcatgtcccacatgggaatctcaaaatattctcaactttgaaacacatctgcctgtaacgatttcaagtaaggaactgtggatgtgtattaatatccctcacatgacaaaggcggtggctgaaaggtcaatcaatttgcttatgactcattctgtggctctgggtggtgactcaaattctaaaaccggttttctttctacccaagatccaagctggttgcaactgagtcacttccaaggctcatcacttctccagtctctgagcccaagtggccaatgcctctagccacttcccccctgcccacctgctggttccaatgggaatgtgctggaaagtggagacccaccgacaatctttctcaaactctttggactcgtcagtgcagtggaagaatttccccttgaagagctgcacagccaccacggcgaagatgaacatgaatagcatgtagacgatgaggatgttgaagacgtttttaagtgagttcaccacacagtcaaacacagcctgtggggtggagttgacagagagcatgaggggctggggacctgcccaaccttctgcctccagtggcccatcataccaaaatactgccatgatcattcccattttacaggcaaggtcataagtcaagtcactagggtaaggtccccccagctttcagaaataagcgttggaggagttggactcaatcctggcattctatggatctaaaactcccagatgggataccagagatgcttttaagtgatacaggagcccaacacagaaaaacaaggtaacaaagttacttcctttccaactctctcaatccttttgagtgaaggagaaatttttacttagttgctaccatgttaacacctaccattgacattttccctctttaaccaagaaagagcagttgtcaatgcacaaagccttaggcaggcagccatatttggttagatttccataacagtatctgttttctgtctttaatttttagtagagacagagtctaactatgttgcccaggctggtctcattctcctgggctcaagcaacactcctgccttggtctttcaaaatgcagggattacgggtgtgacttgatttaaagaaacatattacataagagataatactggggacccccaggtgaagcatagagtgaaagtgggtgctctaatgactggattttatttcccttaatatatatatatgtttttgaatgacaggcttttgggaaatgctggttcatgctattttggaatgggagatactagagcctagaataggtagatgaaaagtcaaaattttatggaacaagaaatctagttcctgcttcccagatcacggttatacccttttaaatccatatgatgccttcatgcgaattaggaaaaaggatcttaaccccaagacacttcatctaaagaaaaactgccataatacacagattattttaggtcagctcactttactgccatctgctgggaagttgtaataatacaaatatccatacacgatggctaggatgttatcagcacctcctttaatgtgttgtccttgagcagtgtacaacctgctcagctgtacatgataaccctgacagtcccccccaccgcaccccaccatctcccaatctcaccttgagctttggcagccgcttgatggttttaagaggtcgtagcacccggaggactcggagggatttaatcgtgttgatgtcttttcctttgctattgccactgtggaggaatgtttaggtgggaagaagggaagagaggaagcagaggtcaggttgggtagggggcagcccacagctccatgggaccctaccctcccaggcctagaagtctggggtgagcttggcacagccctgcccttcctggtgaagagtggtccatttcacctgttaagcttgggctcgggagccagtaagtacgtggctttttgtggttctggtcccagggttggttgagggccctttgccatctggctgggcctgagcagctgtattgggtgtccctgagacccagcacaagggggttggctgattccccacccccatttctgcacagcttttcttttttcttttttgagacagggtctggctctgtcaccaaggctggagtgcagtggcacgatctcggctcactgcaacctccgcctcctgggctaaagccatcctcccacctcagcctcccaagtagctgggactacaggcacacgccactgcgcctggctaattgttttgtctttttgtagagatgaggtttcaccatgttgcccaggctggtttcaaactcctgagctcaagcaatctgccctcctcaccctctcaaagtgctgggattacaggtgtgagccactacacctggtcacagctattttcaaaaaagcccttggtctaggagtttagtggtcccctatgtattcttttttttttttgagatggagtttcactcttgttgcccaggctggagtgcaatggtatgatcttggctcactgcaacctccacctcccaggttcaagtgattctcttgcctcagcctctccaagtagctgggactacaggtgcgtgccaccatgcccagctaacttttgtatttttagtagagatggggcttcaccatgttggccaggctggtcttgaactcctgacctcaggtgatccacccaccttggcctcccaaagtgttgggattacaggtgtgagccactgcgcctggccccctgtgtattctttttaaaggtggtatcagtgggctcttaaaaaaatgggattttctcccccttccaatgggattctggaagatacttaaagtggcccttataccaaatctcccctcccccaccatattccctgagtctgaaggagggaaaataaccgggtgccgctgttttcagatgctgatgtggctgctgccatggtctctgctgcattgctccaagggtctctgagcccatctttgccagagaggactgcacagaagttcagtccaaggtctgttggaactgagcttagcaatgcagaccccagagatgccatgacacccttggccaaccatgactcaggccccccaagaggagggtattgagtgggaccatgaatagcttgtggttcatggcactcatgacccatccagttgtccacaccagaaacctgagagtcatggtcaactgcctgccctctatccccatccccatccccagtgggtcaccttccttaacatcccgccatccattcctgggtgccatcccccctcacccgtctcccaacttgctcctcattccctgccttttcttccatgttttatgcacacagtggctaaagccaatgaccttgtcactctttctcttgctcagaattcttctggagcacgtgaattctcagaagagcaagtgcaaacttctgggcatggcattcaatgctcttgaaaatctagtccaacttaccttcacctttgcattcccatttatggctacatatctcaagccccagccacattcttttgcctctgtctgcttatgcatatactgttcccgctgctagaaatgcccttcctccacttctccagtcacagaactacccggtcctcaaagcccaaattacctgttgctccctccgacagcatttcctgactgcctacctctggctcctgccagctcctatgtgctatttcggagttaatctttgtttgtttcttcggtctctggttttagacagaaaactcttcaaaggcttacagtgtaatctactcttctctgtgttcattttccctttaatctttttttttttttttgagatggagtcttgctctattgcccaggctggagtgcagtggcatgatcttggcttactgcaacctctgcctcctgggttcaagtgattctcccacctcagcctcccgaatagctgggactacaggcatgagtcaccacacctggctaatttttgtattttcagtagagacagggtttcaccgtgttggccaggctggtctcgaactcccgacctcaagtaatccactggccttgactcccaaagtgctgggattacaggcatgagccaccgcacctggccatttcccctttaatcttgattcttgtcctagcccctagcctgcgcctggcgtgtggtctcaggacacgtgaatgcctccggttggagtatttgggtggggaggtcacctagaaaacatctccctacagtgacctcccaggtcatgagcagagctgccccagagacccccatcacgatgggtctcagtatccagtgcaaaaacatcattcttcacaccatttgctttttaaaggactccatttttttcatttttcagggaacaaagacgataattgtattttagcctgctaggcagagatatactccaggattcagaactctgaacctttttttttctttttaaaactaacatcatcattatcatctcaaggctgtgcccccaagtgtgagacacacgttggacagtcactgagataattttaggcagaacaggggcacagattaaataattggatctcagaggggcataatcatttctttttctttctttcttttttattatactttaagtttcttttccacgtatctttcagacgctctgcttttgcgagaaaggaagcctcaggtagatgctaataggcctttaacacctccctaacacttagtaattttccttttaacaaagagcccagcttgaaggcaacaacattgtctggtttctgttagatttactttttttttttttttttgagatggcatttctctcttgttacccaggctggagtgaatggcgtgatctcagctcacagcagtctctgcctcccgggttcaagaaattcttttgcctcagcctcccgagtagctgggattacaggcatgtgccatcacgtccggctaattttgtatttttagtagagacggggtttctccatgttggtcaggctggtctcgaactcccgacctcaagtgatccacctgcctcggcctcccaaagtgctgggattataggtgtgagccaccatgtctggcctacatttacttttgcagttgcagatttatcttaggttagcaatgctggttgtaagtggataatatagtttcctttttttttatttaaattaaagagatggaatctcaggggggagtgcagtggcacgatcatagctcaccgcagcctccaactcctgggctcaagtgatccttcagtctcagcctcccaaatggctgggactgcaggcatgcaccactgcacctggctaaagtttccttttgaaattgaactttagaatacatgttgatagaaaaaaagtcaaggaactgtacatccaggttgcacatggaactggctaaaatcttgatgtcccaaacaagtgacaattgggagcatgtctccatgggcattctgcatctcctcatctgaaaacgattccatggccattttatttttttattgttcaatttattttatatatttttttgagacagagtctcactctgtcacccagggtggagtgcagtggtgcaatctcagctcactgcaacctccacctcccaggtttaagtgattctcctgcctcagcttcctatgtagctgggattacaggtgtgcaccaccaagcccagataattttttgcatttttagtagagatggggtttcaccatgttgaccaggctggtctgaaactcctgacctcaagtgatctacccgcctcggcctcccaaaatgctgggattagaggcgtgagccaccgtgtctggcccactttcattgcttctgataactgctccacccagcttgcctattgaaactgaacctctgccccttctgttctctgcaagaactggtggggcatgggcggaggcattggcaagaccctttgggatgcctccttcgcagggagtgagttctggtcatttgaagcgacaggacagcggcagcaaggacacaaggccacagaaacaggcccagaactaacgaggctgcaccaggggacagatcacgagagacagaatatgagagagagagagagagaaagagagagagagagaaagatagagagagactttaccgtgtactgctcctggtgatgtggcatcggagggagagacagatcgtaagtggcctcagaaaaaagaacacagaacacgcacgtacacacacgcacccctgagcacccccgagtcccgcccgggcagcagttgggggagcctcaggctcatggcgctggccgatgtccatccttccatctggaagccgcccccacctccattcagtcccccgcccttggcaggcacctggcactgcccaagaaagcactaagaaagccaaatttccaggtagcaggacagctgcaaagctgtcagttaccaaaggtgaattcaccacggaaagtcactgccaagagccggagaaacccctcttctccaggcgttgtggagctgcaaggttttagaatgtctaaaaggttgtgagctttgaagttgaggggacctgggtttgaatcctgactctgcctctcgttatcctcatctgcaaaacaggcccagactgggtgccgtggctcacagctataatcccagcaccttgggaggacgagttgggaagattgcttgaggccagaagttcgagaccagcctggacaacatagggagaccctgtctctctccttctctcctttttttttgaggcagggtctccctctgttgcccaggctgcagtgcagtagcgggatcttggctcactgtagcctcaacctccagggctcaggtgattctcccaccttagcctcccaagtagctggaaatacaggcaaatttttccattttttgtagagacgggggtctcattatgttgctcaggctggtctcaaactcctgggctcaagtgatcctcctgcctaggcctcccagagcgctgggattacaagtgtgagccactgcatcctgggcaagactctgtctcttaaaacaaacaaccaaccaactcaggtctgtggaattctgatgtttgattaacaaaagctatggccttggctttgctctttatgaaggagggggtcagcaaagagttctgacttgggatggaattagaagcaactctgaagccctctgagcaaatgcgggcctggggaaagctatcagcacctagcagctggtcctctcgtgattcattggaatcaggcttggggctcattaggcgccttcaacaatgactggagatccaggttagaaagacttgaccgccatcagaatggcggaaaccctgtcgccaagcggactctatggaattttccatccacgacccctctggaagttagtgatttttttttttttttttgaaacggagtctcgctctgtcgcccaggctggagtgcagtggcaagatctcggctcactgcaagctccgcctcccaggttcacgccattctccttcctcagcctcccgagtgctgggactacaggcgcccaccaccacgcccagctaattttttttgtatttttagtagagatggggtttcaccgtgttagccaggatggtctccatctcttgacctcgtgatccgcccaccttggcctcccaaagtgctaggattacaggtgtgagccaccgcgcccggctgtgatattttttaaaacacagaatggtttaaatgtctacaaatattccaagtggattctcctccacaccccctcatctccttttcctgtagtctgacttggggttctcaaattcagtgtatctaggaattattgcatacgtagaatcatatagattctactttttttttttttttttttttttttgatggattctcactctgttgccaggctgcctcagccttccaaagtgctgggattacaggcgtaagccaccgcacccggctttattttatatttttagagacgtggtcttgctctgtcgcccaggctggagtgcagtagcacaatcatagcttaccgcagccttgaactccctggctcaagtgattctcccacctcagcctcccaagtagctgggactacaggtgagagacaccacacccagcttctttacggatgattgagggagttttcaatgacagtgatttttgcctaatctgctgactttaggtttaatatgggagtcttctggacatcactgcatttgcctatgggaagacagcaccattatgaccattttccagatgaggaagctgaggcctagagaaaaagagtgacctgcccaagggcaggcacacagctgggaagacagactaagattcaaacccaggtgtgggtatctcgcactctaatcttctttccatttcatcatacacaagaaaaataatgccttcaggggtgggggctgttttgaagatgaggatcaagagatagcagcctgagggctccatctttggcttcctgacagtttggctcctgggtatgcaggagcagcttgatcaaggcgctctgccagttgcggtcctgcctttgggggaagaacagccgcgccagatggactcttggcggtgagggcaggatcatgatctgccagctgctgagaaatgtcagttggccgccctgatgcatgggcacagagcgtgataccacgtgtgatggctcatgaaatggggtgtttatggtagacgcatggatacaagggacacagtcagtgaattgagcaggacacacacacacagatatttgggtgaggtgcaggaggggtggacatcttcagaagagcttcaatacatcccttggtgggaccacagggatagttttctcccatatcggagacgaggccacaatcacagcactgggggaagaatccttgctttgaccccaacaggccagaatggcaaggttcctttcaacaaggaagggaataaccttatgctcccttcccctattcccttcccctggatctcgcagccctgccaggcctcaaagaacccaggctggccaggctgctgagcatcattctgctcactgtgagcctccgtattcagggctgggagatgggtagcatctgacagctgaacccaacctcagtgatcttgtcggacttacttccctccacagtccctctgggccgcagtttcctcatctagatgggaaaaactgaggcacagagaggctaaaggacttgcacatctagagagaaatcaaacagacctggagggacaatttcttaaaacaataaggtcaatctaatacttgtggggctctcagccttgtctatgaggggatatgcacagaggacagacaaagcaagttaaaagaccagaaaggaaataagcagaggaccctggggtggggggtggggggcgggtggagagttcagcgctcaggctgagaacctcagagcatccatgctccttccaatgtgccaactatccgataacaaggaaagacaataagcaaagtcctcatagggtgagagaccttctcaggcaaaagaggccagaaacctgtaacggggagaagattccaaaactttttagggaaaaaagcagtagctcctattctggttttctagcagtttggctcttaggtgtgcaggaatggcttgatcaaggcacctggccagctgtgctgggcctgcagccctgccctgggggaggaacagcagtaccagatggactcttgacagtggggtggggagggtgtggtaggcgtgaggtttgagggtctcctctctcatcccttcggccatgatataaagatgctccctgttggactcatgtccgtcggctcttccaaaaccctgggagagtcccaggcacttgccaggatcctactggcaaaatctcacacctcccagttcctgcatgatctacaagcctgccagggttgacaggatggcctgaaatccctatccagatccttttcttgcataagaattaaaacaacaacattcaaaatggattttcaagagtgaagggtggctttatgcctgtaccaatttcatgagaacaatgtaaaagcttgactctgcaaacaggctgccaaattcctgtgagttgtaggccaatttgaatgcccttgtataacttgatatttaaaaagaaaactcagaaattaaaaaaaaagtcaactccccaaaagaatcattctgctgttttttttttttttttttttttttgagatggagtcttgctccgtcacccaggctggagtgcagtggcacaatcttggctcactgcaaccttcacctcctgggttcaagcaattctcctgcctcaccctcccgagtagctgggactacaggccctccccaccacacccagctagtttttgtatttttagtagagatggggtttcaccatgttggccatgctggtcttggacccctgacctcaagtgatccacctgcctcggcctccccaagtgctgggattacaggtgtgagccatcgcacccagctcattctgctaattgatctctggtggaaaagaatttttggttcgcttttgcagattagctttgtttaaaagaggaggctaattttacctccagagaacctagaaacagcatgttgtaaacgatggcccataatggcaaaagctcaacaattgaaaggcttgcttctgggtcctttgtaggtcattcccctccctaaattgtgatggtcaactcggaggatggaggtgggacagtcacctcctcagcatttttttttttttttgagacagagtcttgctctgttgcccaggctggagtgcagtggtgcaatcttggctcactgcaacctccacttcccaggttcaagcaattcttctgcctcagcctcccgagtagctgagattacaggcgcctgctatcacgcttggctaatatttgtatttttagtagagacagggttttaccatgttgcctggggtttcaccatgttgcccaggctggtcttgaactcctgaccccaggtgatccatctgccttggcctccgaaagagctaggattacaggcatgagccactgtgcccggccctcctcagcattacagtatgtcagctacaacagaggtctgagaggaaagtgacattggagacctgaacagcttgggcttggtaccatttatctgtgccacactcagtggtggtcactgggaggattcacaggataaaacccattcccctgggcacaggtggccaaggtaagcattgtgtgtggacaggtggatatgagtgacatattcaccccactgcctgccctagtgccctgagctacctgccacctcttgagccctaggaatcttggaggctgctgagcagaccttgccccagaggaaaggggcgggggtccctgcctgagcatgtcctcctgtgtcctgggatctgcctttgtctgaataccattcctcatcagaatgcagggtaggggggccaagtccctgttgccagaccgatgacagagggtcagctttctccaagctacacggtccaggggaggcccacatcacccaaggacataggtcatcaacagtgcagggagtgagagagaaagagagggagagagagagagaaagaggaaaataaaaagatagaaactgagagggggtaaaaggagaaagacgaacagaaagagacagagagagggaagaagagagagggaagagaggggaaaggaggaagagaaagagggagaaagaaaaggaggggagagggagggaaggggctgaaaggcagagaggggtggagaaacccgtaggttatttccataggagaaggattcattccaggctgagggtggtaaaacattctggcttttcaggatttaaattttctcatagcatgatgtctacctgacaacttgaaggacctgcttaaataggtgatagagggggagaaaagtatattttattataatacattcctttttttatttttgagacaaaatcttgctttctcacccaggctggagtgcagtggcatgatctcggctcactgcagtctccatctcctgggtccaagcaattctcctgccttacccacctgagtagctgggattacaggcatccgccaccatgcctggctaatttttgtattttttagtagagacagggttttgtcatgtcggccaggctggtctcgaactgctgacctcaggtgatccccctcccttggcctcccaaaatgctagggttacaggcgtgagccactgtgcccagcctattataatacattcttatatatgctgtttattagctaaaaaaatcattttttgtgtgtgtgtgggggtgcggcgggaacagtgctaacttgatagggaatgaattgtatctcgtttttattttacatttctctgaattccaagggttgatttacctccatttttactagttgccagcattctatcagatttctgtttatgtcctttgcccatttatccattgagaagtagtgtttcttattgatttgtaactgcttttcatattttaaagacatggactccttgtcttattcgtcacaatctttgtcccctaatttgatgtgcattgtattttgtttaattaattatttatttatttactttttaacctacagaacagcttgctaaacctgttttttttgtactcatcactattaaaattattcagtaaccatataaagcataatattctaaatagcaaattcattgatttttaattttttaaactttttatttttttgagacaagttcttcctgtgttccccagactggggtgcagtggtgcgatttcggctcactgcagccttgaacctcctgggctcaagcaattctcccacctcagcctcccgtgtagctgctagtgcaggcatactaccatgcctggctaattgtttttttttttttttagagatggggtctccctatgttacccaggctggtcttggcctcctgggctcaagcaatctgcctgtctcagcctcccaaagtgctgggattgcaggtgtaagccaccgtgcattgctctagtagtcaaatagacactgaaaagctttgaggagagggaaggatgtggggagggagaggagaagagaaaaagaaaagagtaaacgaacaaaaagagaggagaaagaggaggaaggagtgaaagagaaagagaaagaagtataatcagcctcccaaccttcatgatacatctccagctctgaggcatccaaaaactctggagattttttgttctaacacaacttgacctcattgtgttcccagagaagaatctaagtgtggcctacttaacagcccttctactggaaatgggccactattttggccctcctgacaaaccaagtcctcattgtttggtgagggagaccattcaagggcccctccagattggctcaggagggagcctagaggcagaggcacaggaggaagcccctgattctctcacgatgggagtgaatgtgtcaagatcctttcaaaacctgtcagggaatcattcaccatgatgggcacagccagggtccccaagatttgtttcttgattaaagactgattagatatttttcatcccgctccaaatgtctacaacttcaggaatgtactgctaagtctgctatcagggccctaagggctaatggccactcacctgttgggtaccatcttgaaatagtcacccagaacttgggggccattttgaaatggttgccctagaacttgggtgccattttggaatggttacccagaactagggtgccaccttgagatggctgcccagaacttgggggtcaccttcgagtagccatccaagacttggggaccgtcttggaatggctacccagaacttgaaggccaccttggaactcagggaccatgtaagaatggccaccaagaatccagaggccatcttagcatggtagcccagaaatcagaggccatcttggaatagccacccagaacttggatgccaccttggaatggttgcccagaacttgggggccaccctggaactcaggggccatcttgcaatggctgcctagaacttggggccatcttggaatagccacccagagcttggggaccatcctggaatggctacccagaacttgaaggtcaccttggaactcagggaccatctaagaatgaccaccccaaattcagaggccatcttggaatgatagctcagaactcaggggccatcttggaatggccacccagaacttggatgccatcttgggatgactactaagagcttgggtgccatcctgaaatggctgcctacaactggggcgccatcttggagctgcaggatgacacatggcctttcagagggcagagaatcctaggactgccaggagaagtgaaagacacacaaagggagtcaccaggtctacaactacggggccttcaggcatagggagggggtcagaattctcatgcacattcgtttcctgattgtctctttagggactttccaaagagacagcggtttgggcggcgcttgtggagtagtagggggatgagatgttccggcgaggctagtctacaggaagctgcacagcaaggggccagtgatgtggctgaggcccgttgctgtgtgaggaggtagaaggttggcaggagggggggtcccttctccttcttcctccatggacatcatgcaaaaagccatcgaagctcttcctggtggcatgctgatatctcccacgtccccggagcccacacaccccatccctagaccctgagaacatgtcctgtaatccgatgtgtggcccaggctgggggttgggggaaaagaggcaagaggaacccttgcgaggagacttacgtgaaggcaaaggctaccagggccccactgaccactatgaagtcgagaatattccagaggtcacggaagtaggcaccctgatgcaggacgagccccaggtcaatcatctgtgggggagaagagagggtgctcagaacccccacctgatccccaccctggggtgctgccacccactctctagcctctcggggagaggcagggaagccaatgaggccacctcatcttgcagggatgggcagtggccagaggactccagggaggagtggggagcccctgccccatgaggcggcccccctttgcctgatggaagccagctctggcttgccggctcttagatccaaactttgggatcctctttgatgcctctttgtcccaaatccctcattggtggctctatcagcaaaactcactggctctatttccagaaccttccaagaatctgtccacttctcacctcttctttggtcaccagcctgatcctgtccccgtcatcgcccatggggaccagtgtgatcacctgctcacaggtcctctggcttcccacagatgccaaagggcacctgtgaacacctggatcaagtccctcctctgctcagaacactctatggccctcacctcactcaaagtaagagccgaagagccctctctgtgatccccggcacaaggtgccccctcacctccccactcatctctctgtccttcgtttccccactgttctctcactccgcccagccacaccagcttccttgctgctcttcaaacacaccaggcatttctaatcctctgggagactcatcctctcaaggggggcattcttggaggctcaggatctcctggaatcccagctcttttttttttttttttttttgacagagtctcgctgtgtcacccaggctggaatgcagtggcaagatctcggctcactgcagcctccacatcggctcattgcagcctagggttcaagtgattctcctgcctcagcctcccgagtagctgggattacagacatgtgccaccatgcccggctaatttttgtatttttagtagagatggggtttcaccatgttggccaggctggcctcaacctcctgatctcaagtgatctgcctgcctcagcctcccaaagtgctgggattacaggcatgatccactgtgcccagccctgcacttgcttaaaaaaaaaaattaccgtgtgttctcacttataatctgcactcaccttgatcaccatctcaaaggtaaagacgcctgtaaaaacgtagtcaaagtatcgcagcacctgtaagggataaaagcaagagagcagtggatcactggcctgttccagcagagccccggtaaaactaacgatcgcctactggggagcagagtttctacccagaagaggaaacacagctgctatatacagttgcgcagggcgtgcactgcacaagggcccctcccatctcttttcatactgcagatttgtatgttgtgaatgaaattgtccagcagatggcagcaaatcctaacaaaaaaatcactgtactaggccagttcgctaacccacgggaagggtaccttttaaaatttgccccaagccctgtagtggattagaagcggccccagagaagttcagggctgactgtatccttcttggtgatggatctaatcccccagtacccttgctttcctgggcatcctgggcgagaaatagttgctacgtggtttttttaaacactggggccaacttcctgccacggcatctcttcctgcttcaaggccaggcccctgccagggtaggttgatttttcctgtgcccctccccaggcctgatgtttctgcctggacgagcaatgtcctctggcccagcccctgtccaggacacaccatagcacacctctggtgtcacccaggcctgaagatgagggtgcgccggcacagtgtctggctggtgctagacatggggtggacaccggctgggcacggtggctcgagcctgtaatcccagcactttgggaggctgaggcaggcagatcacttgaggtcaggagttcgagaccagcctaaccaaatggcaaaaccccgtgtctactaaaaatataaaaaattagctgggcatggtggcgtgtgcctgtaattccagctacttgggaggccaaggcgtgacagtcacttgaacgtgggaggcggaggttgcagtgagccgagatcgtgccactgcactccagcctgggagacagagactgtctaaaaaaaaaaaaaaaaaaaaaatcagatccacccagaagctgcaagggctgagcattactgaacatggccaccagagggcgctgtgaacaccaaagaagtcaggcacatccttcccctgcttacaatcctccgtggctcccacctcattcagggataaaagtcaaagtcctccccgaggccctcaagcccctgcacgatctgaccattcagctccctgccctcacttcctctcattctctcccttgctcacttccttttgttccccaagatgcttccacctcagggcctttgcacaggctgttctgtctctctggaatgctttcccccacatcccatttgattccgtctttctcctcctttatgacttagctcaaataacactttcccagtgaggactcccctgaccggctgtttaaattccatctcctggtgcttgagatcctctttacgaagtctctccttccctctgcccaccacacccccggccacttatcactccctgaacatttgttgtagttactgataatctcattgtccatctcccccacccaaatgtcagccccacaaggacagggatgtctgtctgtcaccatggcgtctccagcttataatacagggtcaggaatacagtaggtgctcaagaaatgtttgttgaatgaatgcatcaacagttggggctgtactgggtcctggaggagctgggctctgtgatctgtgtggttataacttatattcctgttatatgtggtgcttgaagaggaatcagagaccagagtgcctggggtcagggtgaggtgacttcctggagggaggggctggtgcaaggggattggcttgaaagacctgggtgggcagaggggatggtggtgggagagtatttcaggtgcacgaggcagtgggcacagcctggtcaaaggcctggtggtttgtgggctctgggagtgcagggaccatctcataccctgtcaatcctccctggctcgctcagtacctggcacatagtagttgcttatcaaatacttactaaaggaatgaatggaaggaaagaaggaagagagggagctgggaaagggcaggccgtgggggtcaggtgaatctaattctggagctcttaataagctgtgcaagaggaaatcaaaagaccaataaattaggttcaagtattcctaatacttagatctttttcatctatttgaaaatgttatttcctgtggctcagtctaatccaaaaaagtgcttgatctcattcattacagggaaatgccaagcacaaccccaataagatctcactccacacccagcagatcggccaaatgaaacagtcgacagtaccaagtgttgacaaggatgtggaagaacaggagttcccatgagctactggtgcaagggccactgcgttcatttattttttaatttttttttgagatggtgtctcactctgtcacccaggctggagtgcagtggcacaatcttggctcactggaacctctgcctcccgggttcaagcaattcttctgcctcagcctccaagtgtctgggattacaggcgcatgctaccacgcccggctaatttttgtatttttagtagagaccaggttttaccatattggccagtctggtctcgaactcctgacctcacgtgatctacccaccttggcctcccaaagtgctgggattacaggtgcgagcccggcccactgtgcccggcccactgtgtttatttttatttatttatatatattttggagacagggtctcgctctgtcgccaaggctagagtgcagtgacgccatcttggctcactgcaacctccacctcctgggttcaagtgattcttgtgcttcagcctcccgagtagctgggattacagttgtgtgttaccacgcccagataatttttgtatttttggtagagacggggtttcaccatgttggccaggctggtctcaaactcctgacctcaggtgatccacccgccttggcctcccaaagggtcactgtgtttattgtccaataaacattcaagctgcatttactgaggccaaccacttgcaaattatatgctctagaaacttcgcttttggtttataccctggaggaattcttatttattgagacagggtctcgctctgtcacccaggttggagtgcagtggtatgaacatggatcactacagccttgaccttccagacccaagtgatcctcccacctcagcctcccaagtggctgggaccacaggtgtgcaccaccacgctcggttaattaaaaaaaaaaaaattttttttttttttggtagaggtgggggtctcactatgttgcccaagctggtcttgaactcctggcctcaagcattgctcccaccttggcctctcgaagtgctgggattataggcgtgagccactgcatctggcctcctggagaaattactgtccaggtgactcaggaaacatgttgaggggcgtggcatggggacagtattcacacttagaaacaacccaaacatctgtcaacaggggatggataacacatcccatgccacacagtaaatctcaaaacagcatcataaagaatgctcattgaccgggcgtggtggctcacgcctgtaatcccagcactttgggaggccaaggcgggcggatcacttgaggtcaggagtttgagaccagtctggctgatagtgtgaaaccccgtctctactaaaaatacaaaaattagccgggtgtggtggcgcctgcctgtagtcccagctactctggaggctgaggcaggagaatcgcttaaacccgggaggcggaggttgcagtgagccaagattgcaccactgcactccagcctgggtgacagagcaagactccatctcaaaaaaaaaaaaaaaaaaaagaatgcccatcaatcctgcaaaagcaacatgtactcatttaatgcgaagcatagaagtgtctcatttattgaatgttacagaagagcaaacataaattcagtttttaagaattggccagtgttggccaattacaggcatgtaagaattggaattacatgcctgtaattccagagctctgggaatctgaggagggaggattgcttgaggtcaagagttcgagaccagcctggcaacatagcgaggcccgtttctacaagcatttaaaaattagctgggtgtggtggtgcatgcctgtggtcctagctacctggggggctgaggtgggaggatcacttgagcccgggacgttgaggctgcagtgagccatgatcacgttactgcaccccaacctgggcgacagagagagacattgtctcttaaaaaaaaaaaaaaaaaaagcctgtgcaggtgggaaaaagagagaagccaaaaacgctcattccagaagctggggtcgtggttaccggtaaggcagggtttctcaagctgggctctgtggacatttgggtctggatcatcctctagagtgggggctgtcctgggcatcggcgggtgctgagcaacatccctggcctccacccaccagatgccaggagcacctcccccctcctgtcgtgacaaccaaaaatgtctccagacagtgtccccagcagctctagagggaaagaaggcggtgggggtgggggatcgaggaggcacatgccgcgtggggcgtttttgttctatttcttgccctggatggtggttacgtggtgtgaacgttatggggccacagtgttcttgtagagaagtttcgactgcgagatggacgagggagggggccggggagctgaacgctctttgcaaacagtccctggggcctggtctgagcactgcctagattcccttcagccctgggagctgccgtgccccctggatcatccatgcctgtgccctccctgccgaaggcaacgccttcttcagcatcctcgcgtcagcagggggtttgtggacccctccagggacacctcctccccacgcctggctcctggaggcccctgggggaaaccaggctgcgggaagcaactaagcggactgtgaggaggctgagcactggctctagcttcctccaggagctgcgttctaattatttccttccatctcccccatcaggtccccaggggggcctgccaggcctgggaaggaagggaaagtgcatggtaagctgtgggcgggcttgagggatggggctcgccagctttgcctgggtcctaacctacttagccagggcagcagagccttggaccagcagaaaacacacttttttggctctgggttgggagggaagggttgggggagggagctggggagggaaacaggagccaccagtccaccctctaccaggccctggggtcaagcctctgcccgcagcccatgactgaggcacgcccttgcctgttggtgcctcggtttccccatctcaaccacaagcatgcactcattcctgcttgtcaggactcaaaggggctatgcacacccatccgtagcatacagtaggtgattagtaaatgcagacagttgggggaagcagtgggagctttgggggatgcagagttggaattctgctgtgtgaccctggacaggccacttaccactctctcattcccctgagcctcagttttcccatctgtcaaatggggatgcctgggcggggggttgggggggcgcattgtgaggattaaatgagatactgcatgctgagtttcttcctgggacacagcaagtgctcaattaacaggggttgtcaacagacccaccatccgcaaaggggcttgctttcataaaaaccaaaagcttaggctgtgtttctgagccaaatagttgtttctttcaaagcttcgtgtacaaagggaaatgtctactgcggaggggaccacctctgagcaccgcccctgccccagtaacccccctattccatgtagagaatgtgcaacatccatatcctgctagtctcacgcctccattagagaatccagcaattttcagccccagtcactctgggccacctccaccccaccaggctcacagagaaactgcctcaaggaatgtcttgctcccaagagcatccccaaggaatcagagcttcccctctcaaccagcagccataagggctatgcctaggggtgaccccaacatcccaccctacctatgagcattttggatgcaggagaaagtggcctgaggcagagcagccaggctaggaaggggtgtgctctgtgggactcacgttgttccgaggtgcgttgggctgcacagggtcctcggcggccagggcgatgctgctcatggcaatgaccatgaggatgcacatctcaaagtagcgcaggttcaggatgtaatggcacaggcggcgaaggctgttggagacagatgggcgtgcagaggtccactcagaccacaggctcacaaacccttttcttccataatctcatgttacctaccactactgagatctccaacccccaaggcctcctacacaacaaactattaaactcctccaggtgggggccctctctgggtcctggaaccccaagaaggcagaggggacctcggtgagagaagacattcacatgccctgtttagcaaagttcctatcactcccaaacgaccctcttgaagtatcttgatccccaagctaggttgaagaaatacggtccttaattctgtaggagataaaaaggcttttcgatattaaatgtcccagggccaaacaatattgtgaatctatgggttaagtagatttctttctttctttttaaaaattagctgtgtgaccttgggcaagttacttgtcccctctgtgccttggtgccctcatctgtaaaatagccgtaatactagtgcttacttcacaaaatcatgagacccaagacttaatttatgcctggctcatgataggggctccaaaaagttagttattgaaattatgaattgcaggccttatcagagccttgaatgtgccaatgggatgtgccagttaacctcttaataagtggagccaataataaatagttcataaggttgtgtgaatggcagcagagctgagtggttaagaacaaggaggctagagccagtgtctgggctcaaactccagctctcccactggcttgctgtgtgaccttgggcaggtgaattcacgtctctggacctcagttttttcatctgtcaaatggagctaagcatagtaacaacctcagagaaattaaaaaaaattttaaggcactcagaacagtgcctggcactgagtagataccacataagtgtttccttagtaaaatcgataagtcaactaaataaaaaagtactttaaaggtacttttatttattactacccagggtgagttgccaagaggcagattatagaaagcagcttctcccccatcttatctgacatgatccttcattgtcaagaagcattttgagcggtcaggctttcaagaaatatccctgggagacattcaattctaaaacaacctccgagccactacgacattcatgggataaatttctcccctaaatagtctatccatttcaaagatgcccaagacagaaggccatggaactcagacactatccgcccagaatctaaacccttacagagtctaggttagaaacagagttcaggtcctagggctgccacgtgcagttgttcaggctgtgtactgcacaaggcagccatttctaagggggtgcctcttacatcacagtgaagatttgtttatttatgacaaatttatttgttgtttaggacaaatttatttgtttatttatgacaaatttgtttatttattgtcataaataacaatgattttctagtggatggcaggacaggggtctcttccaacaaagtatattgtgacaaatcatcttacctgacttacggaaggagcatccattttcaacttgttcaaaggtatccctggactcatggtggtcaacactcactcattgccctctatctggcctgacttccgccaccctggtgggagccccaggccccccctgcccttgctgggggccatactcacgggttggtcgtggacaggatgaacatggagctatagggaggcattggcttagggccgtcttccccacggtcgtcttcctcctcctccttcttctcttcctctttttttggcagtgggtctgggttggcgtttttgttcactgttgggacaagaaccaacacagggctccctccacaatttcccacaagtctctgggaactcctgtgtactcccagggcaggcaagaagcggctgacatttctaaagtgcctgctgtatataccaggcatcttatgacatcactgaacccttgtatagccctgaggttgatatattctgatctcctgtttacagatgaggaaattgaggcacagagaagtaaagtgacttgtctaaggtcacacagcaggaagtggcagagctggcatttggaacccaggcggcctggcccccgagagcctgctctcaaccactctatagccttgagtgcggtggggccctcatgggatattaacacagacctgcccctatcctcgttggaccttcacaccctcacttgcaggcaggtagggagagtgccaagagacccactgaacagatagaaatactgagacctcccataaactgcatggcatgcccccattagcacccctctcttgactcagggggaggagccatcagcctctggagcttccattctgcagcccagcctgcttatgtgcccacgggcaggctgagcctctctgagcctcagtccctacatctataaaatgggcacagtgacaagaccttaggatcttaggtctcaggaccatggaaagcctttatccagcaaactcatgaaaatctctcacatagaactgacactagatgaacttaagacataatccacccagcagttcaccattttttttttttttttttttttttgagacagtctcgctttgtcacccaggctgcagtacagaggtgccatcttggctcactctacctcggcctcctgaagtactgggattacaggcatgagccagtacatctggccccttttttaatgtggcgactagagagtttaaactgacatttgcatgtggcctgtgttacatttcttttggacagtgctgggccgagagaatcaatcatctgaccccctcaagcttccatcagaggaccctattgctcctcaaatggggtggcttcctggctccccttgggaaggaaggacgtagaagatattgctaacccgactgaacacaaccccgtgccaggcactgtgcacaaattatctcactgaaccctccacagccctgtggggtaggaaactacgcctatgcccattttccaggggaggagactgaggccagagagatggggtcacagtccagggtcactcagcagagcctctggctccagggacgccaggtcccctgcccagtgatgtgagagcagagggtctcaccttgtacgacggtgtggttgagggggggtgggcaggctggggggatgtccactgtggtgtggtcgggtttcctggcagtcttagctgaattggtctgggtgccgctggggttggtgacgataaggctattctcgggggtcttgggggggccgggattggatgggttccccgggttgttgggcgtccggcggctggcggcgttctgggggttggtggccatggcagggatggccagcatggggccggggtcggtgctgtttcccatcttggctgggctctggggcaggccggcgtggccaaggctgccgtggggagcggccgactccgcggtggccagcttgttgttcttcatgttgtcaatatcctctgccaggggtgggtcttggcggcccaggtcctgctggattggccgggtggttgacaggttggggcccgacacagggaccccggagccctggttctctctgaggaaggcaagtgaatgaaaaagaaccaacaactgatttaggataaaaggcaacagttcaggatcctagctaagattccatctttcaagagtacaatttgggctgggcgcagtggctcacgcctgtaatcccagcactttgggaagcggaggcaggaggattgcttaaggccaggagttcaagaccagcttgggcaacatagtgagaccctatttctacaaaaaatgtgtaaattgacgggcgtggcgctgtgtgcctgtagttctagctacttgggaggccgaagtgggaggattgcttgagcctgggaggttgaggctgcagtgagccgtgatcgccccactgcactccagtctgggtgacagagtgagaccctgtcaccaaaaaaacaaaaaagaaaaggaaagggtacagtttggtcatggagaagtcatgtcccagatccctgcagtgcctggaattgagaggagcctgttcacttcttggtcagaggtcaagaccttcacgtgcccatggacaggtttccacaactccccatcatcttatttcttttctttctttctttcttttttcttgctctgtcgtacagtggcgtgatctcggctcactgcaacctctggctcccaggttcaagcgattctcttgcctcagcctcctgagtagctgggattacaggtgcccaccactacgaccggctaattttttgtatttcagtagagatggggtttcaccattttggccaggctggtctcgaattcctgacctcaagtgatccacccacctcagcctcccaaagtgctgagattacaggtgtgagccactgcacctggcctctttttttttttttttttcagacagggtcttactctgttgcccaggctggagagcagtggcaggatcatagcttactgcagccttgaacttctgggctccagtgatcctcccatctcagcctccaggtagctgaggctacaggctcacgccaccatgtctggctaattttacaattttttgtagagactggcgtctcactatgttgcccagggtggtctcaaactcctggcctcaagtgattcttcctcctcggcctcctaaaatgttgggattacaggcgtaaaccacaatgcccagcttgtttttaactttcttattcttagctgagttttcactgcctagtacagggcctctcacacagtcaatgctgggtaaacttactgtcaaatgataaatgaatacccccattttctttttctttctttctttttcttttttctttttttttttaactgagacagagcctcactctgttgcccaggctggagtgcagtggcaggatcttggctcactgcaacctctgcctcgtggattcaagtgatcctcgtgcctcagcctcccgaatagctgggattaccagcgtgcaccacaatacccagctagtttttctattttcagtagagacagggcttcgccatgttgcccaggctgcttgaactcgtggcctacagtgatccacccacctcagcctcccaaagtgctgggattataggcctccctaagtgctggatatatagagccaccgtgcctggccagaatgtccccattatccagatgaggatactgaggccccaggagagatcccacagcctcaaacctcccatcaacccctgcctctccaagccatggacacctgggccctgcctcttgccatctacaggtggacaaagactcacttagtagcccatctgatgccttctggactacagacccctggacaacacagccctggtttcccataaatctatctagaaagaataaataaataaataagtaataaataaaaggctggctttccccagagggcttcccactggctaaactaccagcaccattctcctcattttatttttgcattttaacttgcaaaaacccacggtgtttttagtaagtggaagagagacaagctaatttattttcagaccaaagtaggtaagtgggatgcttctatgaatacttcccggaaggagaaaccgaggcagttccactgtttctctgagactgcacaggggaaatagacaggtccaagcaactttctgccttctcagttttgtgagtgggtcatagagggacatttcagaagacaggctgacctgggtttgaatctcggcaatgtctttttttttttttttttttgagacagggtctcactctgtcgcccaggttgtagtgcagtggcgcgatctcagctcactgtaatcgccacctcccaggctcaggcaatcctcccacctcagccttcccagtagctgggacttcaggtgcctgccaccacgcctggctaactttttaatttttctttttgtagagatgaggtctcactatattgcccaggctggtctcaaactcctgggatcaagcgaccctcttgcctcagcctcccaaaatgctgggattataggcatgagccactacacacagggaaatctcagcaacatcactagctgtgcaaccctgtgtgatttgcttaacctctctgagccttagttcccacattttaaaatttgggataacaggagtagaaccttccccatatcctggagactgaagcaatgatcctggaccttctttaccacataatctccagtgagttacttagcctcagttcctgacccataacatgcgggccgtaacctcattgagtctggctctgagaactaagtatgttaatgagctgagagtcaccgaggattattctcaggccttgaaacctaatgggatttgtcttgctggatttagcacttgcttaggactggtgacctctttatcccttccaatttctcccttttgcaatgggaacgtctatcctatgcctgtcccgctgttatattctggaaacatacaaagatcacttgttctgtagtttctatattatatatataacatatatattatatatatttatcttatctatcttattttttgagatggagtcttgctctgtcacccaggctgaagtgtaatgcacgatctcggctcactgcaacctctgcctcccaggttcaagtgattctcctgcctcagcctccagagtagctgggactacaggcctgtgccaccacacccggctaatttttttttttttttctgtagttttagtagagacaggattttgccatgttggccaggctaaaactcctggcttcaagagatccattggccttggcctcccaaagtgttaggattacaggcgtgagccaccatttctggcctaaatgaggtaaattctaaaccaatatttcctcaacatcttggacagtccacaaagaaatccctaattctaacctgcttgtgatgctttttgagaagttgtgtatcatgaaaacctggctgagagtattttctcatcatctgtaatgtgtgtgtgtgtctgtgtgtgtctgtgtgtgtataataataataatatatttttaagagacagggtcttgctctgttgcccaggctgaagtgcagtggtatgaccatagctcactgcaacttttaactcctgggctcaagcgatcttcccaccctgggtagctgggattgcaggcacacactgccatgcctggttatttttattaatttttgtagagacagggtctcactatgttgttcaggctggtattgaactcctggggctcaagagatccacctgccttggccgcccaaagtgctgggattacaggtgtgagccaccacgcctggccctgtgtatgtatatgtgtatatatgtgtatatatatacatacacatatatatacacatttcagagagtgatatccctgccataaagcaggcccagttaagttataatttcaaagagaacctaaatcctttggccaccagctcaagaagccatggagaaactcgtggcggcattttcttagaggaataccatctaccaagagcagatggaaaagggtctgccaatgtgttttgtcttgtttttgcttccttgtagagcgtctgttggctctgtttgttgggaaattttaacaagctcagcctgcagaggcctaatatcaatttccgggaggtttcatttccaaagtgtctccaaggagaactcaaaaggggcagaaaactttgaagctgcacccctacccccttctccctggggatctggcatcctctgcctggaataggtggccagttgcataacacctgctgtgcgtggcgttcttgtgccagctgatcacttgggcatccttctgcagagggctgtggacaccttgcctggggcacactcagaccctgagatcggattatgtgggggtgataataacagcagttcctgtttattgcttatctcgtgtccccaccccctgtcctaaggacctcacgtattaactcatttaatccctgcaactaccaccatccgagatgggtatagtgatcagccccatttcacacaggaggagactgaggttcagagaggcaaagttacccagagttacccagctggaaaacagctgagctgggctctctggtgttcaaagctttaatggggcagcttggtacagtggcttacgcctgtaatcctagcactttgggaggctgaggaaggaagatcgcttgagcccaggagtttgagatcagtctggggaacatagtgagaccccatctctaaaaaaaaaaaaaaaaaaaaaaaattagctgggcgtagttgcacgagactgttgttccagttacttgggaggctgaggtgggaagatcatttgagtccaggagtttgaggctacagtgagctatgattgtgccactgcactccagcctgggtaacagagcaagactgtttttttttaaaaaaaccaacttgggcccattgggggtaccgtaagaattagagtgctaagtaattaaccactccctacccccatgcaggataaactgtggagctcaaaagtccagcatctctcttcctgttccttttggggagcaggttgtcatggtgacagatgcaggtggaattaggatgcgaacagcagagataagaattctagagtggagcaggtcttggcaaaagttccctttgcaagcagataggcctgggagaaggcactgcctggttgcaagggagaggcagaagctctgtcctccatagatttttactgacagtctgggaaagttccaccctcattttgtccaccctgcagggccactgggctcggccacctggtatgggggatctggggccagcagccattgaattatatgaaatagaatgtgcgtcagtccacttttcactggagtgagccactgaaagacagatgaaggtaggaatgaggagaagacaaagtgaataaaaaggaaaaaaatatgatcggcctggcaaggtagctcgctcctgtaatcccagcactttgggaggctgaggtgggaggatcgcttgaacccaggagttggagaccagccttggcaatgtggcaaaaccctgtgtctacaaaaaatacaaaagattagctaggcatggtcatgcacacctgtagtcccagctgctcgggaggctgaggtgggagaatcacctgagctcaggaagtcaaggctgcagtgagccatgattgtaccactgtactccggggcctggatgacaaagcgagaccatgtctcaaaaaaaaaaaattatcaatatgctggagaatgaaaaacacagggtacgtttgcaaaaagcctcaaggaatgactgaagaagaggaaaaatgtacaaggcagacctccgaaggccactggctttgtcacaacagagaacgaaaatgtctttttattattttatattctcaaataaagttttatctttgccactttttttaaagcagatgaatgactgatcttgaatttttttctcttaaagtgcatgaatcttcatgaacttttatttccaaagagccttagaacctctttatcagccaaatgaataatgtctctcccggccagattgtttgatgtgtctattaataatggaattagcagtactcccctggttcagaatgggggtctggccagctgaggctatgggggtgaaagtggggagatagtttcttcctctgaagaagagagggagcaggaaccatctgtgggatttgggcaagctgggtccttattgctttttatgtttattgatgagagtattactaacagtattagctgacacttcctgagtgcttactattactgctaaaaatagcattcattgagtacttaataatattcatattaataatagctaacatggccaggcatggtgtctcatgtctgtaaatccagcactttgggaggccaaagtgggagaatttcttgaggccaggagtttgacaccagcctgggcaacatagtgagaccccaaaatgctacaaaaaattgctaacatttattgagctcttggtataagccaggaaccactcaaagcattttacacgtactaactcagttaaatcttttttttttttttttttttttttgagatggagtctcgctctgtctccccggctggagtgcagtggtgcgatctcggctcactgcaagctccgcctcccgggttttacaccattctcctacctcagcctcccgagtagctgggactacaggcgtgcaccacctacgcccggctaattttttttttttttggtatttttagtagagatggggtttcaccatattagccaggatggtcttgaactcatgaccttgtgatccgctcacctcggcctcccaaagtgctgggattacaggcatgagccaccgcgcccggctcagttaaatcttatacccagagaaggaggtagctactattcttatcttcattttatagatgaggaaatggaggcccagagaggagtgaaattctgaaagtcacacagcctggaagtgatagggcaggaatgtgactgcctgccccaaagtccttgcctttcacaaccaggctttgctgctcttgtagtttccaatgtttactgttgtctttcaaaaactcttcctggcatattgttagggagagacattttgtccctgtcactctgcctccttcaataacagtagatctgttaataaggctgataataacagtaatattagtaataatagcaagagtaattaataatcattggtctttcttttttttttagacatgaggtcttgctcatctctaaaatgagcaatgctactgcaatccaacctgggcaacagagcaagaccctgcctcaaaaaaaaaaaaaaaacaaacaaaaccctaaataaaccaacaaactaaaggcacagataattataagcaagatttttcacctgtgtgaggagcactagaaagtcatgaagaggaaaggataattcttttccatatgagactgtcttgtacatggtagggtatttagtatactggcctcccattctctaaatgctcaggctggtctcgaactcctgggctcaagcaatcctttgcctcagcctcctgagtagctgggattacaggtgcataccactgtacctggctttttttttttttttttttttttgagacagagtcttgttctgttgcccaggctggagtgcagtggtgtgatctcagctcactgtaacctctgcctcgcaggacaattcttgtgcctcagcctcctgagtagctgggattataggcgtccaccaccacgcctggctaattttttgtatttttagtagagacagggttttgccatgttggccaagctggttctgaacccctgacctcaggtgatccacctgtctctgcctcccaaagtgctgggattacaggcgtgaaccatcacactggcctgtacctggctcttcattggtctttactatacagagagtgctgtggtaaacactttattccacctaaactcccgttttgatctctcattcccctgagtgactgacagccccagagtctcatcaatgcaccttcaatttctttgtcactttctcgtcactagtcatgtcctgcaaactggcctccttctggtccaccccagggcctttgcacatgctgttgttagactgaaacactctactcccttctcagattgctcctctggaaacctgccctgagaccctgggagcagtttcttggtcgtatttctcagaatgtctcagaccacttcacttgcagttgtgtgactgaactcacagcatgagcttagaatatagtaggcacttagtaaatactaactgaatgaatgcataaacccataggagaagattgaagcgaaagaatgacctagaacaatggttttcagaaaactgttgtagaactacgtggaaacctaataacataatgattgaggggcactgcaggcacttagagaatggtaggcagttatactaaataccctaccatgtacatgacagtcccatatgggaaagacttatcttttcctcttcatgactttctaatgtccctcaaagaggtgaaaaatcttgcttgtaattacctgtgcttttagtttgcttgtttgtttgggttttttctttctttctttcttttttttttttttgagacaaggacttgttctgttgcccaggttggaatgcaatggcataatcatagctcactgtaatcttgaactcctgggctcaagcaatcctcctgcttcagccttccaagtagctagaactacaggcacctgccgccacacctggctaattaaaaaacttcttttgtagagatcgaggtctccttatgtcgcccaggttggtctcgaactcctggcctcaagcgattctccttcctcagcctcccaatgcactgggattacaggtgggagccactgcacctgatcctgtgcttttagtttaaacctaactcttttacataagaacacaacatattttttgtatgtttttaatatacattgcattttcctgcaatgcaactattaaataaatggaagaaagactagactcttttgtatatggaactttgccaagaggtgttcaacattgtggaacatcttgacactgctggcaactcccctcatgtggtttgaattgtccacacaacccagagttagccatcatttgtgcctgtcacttcatggtgattttgtgtatggtgtacatatcagaattacttcactatgtcctccagagtctcattactcaaaatgtggtccctggaccagtagtatcagcctcatctgggagctcgttgcaaatgcagaatctcaggctccactgagtccttagccctacggaattacaatttgtgttttaacaagatccctggggattcacatacacattagattttgagaagtgctggcctacctcatatgtcatacaacaggatcacttaaacccatcattaaaaaaatcaatattatgccctgatggtaatataaaagaggactaagagcaggttaatttgtaataggacaatgtctacgatgtctattttaatgggtaagttgttgagtccctatatgcagaatcactatagcatctgctagaaagtattacaaaatgtcgttatgaaaaagaggatgctggttctgaatggataagttgctggcctggaagatgcctcaaaagctttctaacatttttatttatttttaaaaggtgaggtctcactatgttgcgcaggctggtcttgaactccggggctcaagtggatcctcccaccttggcctcccaaagtgctgggactacaggcatgagccaccacatcccgctgcatccaaagctttgaaactctgctctcccttcaattctaacggcccaaagtgccttttctttttctttattttttattttattttttgagacaaagccttgctctgtcgcccaggctgaagtgcagtggtgcaatcatagctcatcatagcctagacatcctgggctccagtgaccctcctgcctcagcctcccaagtagttgggactgcaggtgcatgccaccacatctgtttaattttttatattttatagagatggggtctgcctctattgcccagactggtctccaactcctggtatcaagtgatcctcccaccttggcctcccaacagagtggcttttcaaacttccaaagaatagcattaggtaaatagagttggctgaaaatggccaaaaatgctctaaatttaccgagcacttattatgtgtcagctgctcttccaggccctttgcatacattacctcattcaatcctggcaatgacccaattagatcccactatttccattgtgtgaggcccagagatatgaagtcactttgcaaaagtcacacagcaagaacacagaagactatataattctggacgacagtggggcttctcttaatagtttccctgaaatgctcaaggcctctggtgccagagagcctgggttcaaggacactggttagaggaatgaccttgaggagctcactcaatctctcagtttccccatctgtgaagcctctaatccgaacactttgggagactgaggtgggatgattgcttgaggccaggagttggggaccagcctgggcaacagagccaggcctcatttctactaaaggtaaaaaaattaggctgagtgtggtggctcaaccctgtagtcccagcactttagggaggctaaggcaggcggaatgcttgagttcaggagtttgagaccagcctgggaaacacagtgaaaccctgtctctacaaaacactgtctctacaaaaattagccaggcatgtggcacatgtctgtggtcccagctacttgtgaggctgaggcggatggcttgagcccgggaggtagaggctgcactgagctatgactgccactgcactccagcctgggcaacaggcgagaccctgtgtcaaaaaaacaaaaacatacagcatttttttttttttgagacagagtcttgctctgttgcccaggctggagtgtgatggcacgatctcagctcactgcaacctacctccacctcccaggttcaactgattctcccgcctcagcctcctgagtagtgggaatacaggtgggcaccaccactaatttttgtatttttagtagagacggggtttcactatgttggccagcctgttctccaactcctgacctcaagtgatccgcccgcctcggcctctcaaagtgctgggattacaggcatgagccactgctcctggccaaatacagcactttttttttttttttgagacagagtctcactctgtcgcccaggctggagtgcggtggtgtgatctcggctcattgcaacctccgccccctgttttcaggcgattctcctgcctcagcctcctgagtagctggggctacaggcgcctgccaccgtgcccggctaatttttgtatttttattagaggtggggtttcaccatcttggccaggctggtcttgaactcctgacctcgtgatccatccgcctcggcctcccaaagtgctgggattacaggcgtgagccactgcgcctggccaaatacagcattttataatatatttttataaacaaatacacagcacgtgctactttggctgttgtcattattaatgttaccgtcattctgcggattcgaggtcacctccacttacttcctcctccgatgcctccgctccttgtcctccctccgcgcgtccccctcgtacgtggctggagcgccatgccggtgccttctcctgcgctcgcccccgtcggggccctcgccctcgccctcgccgccccgggccggccggctgccctcgcggtgccgcgccctccgctccgccttgtcctccggaccctcctccccgggcctgcggtgcgcgcgatgacgtcgatgctccccgtccgcgcccgtgcgcggggacccgctgcggctctccctgctgcccccctgccggtgcacgtgcctccggtgggggtccccggccttgcctcgctcggcctcgccctcccagaacccgggttgctccaggctgccctcccgggcgtggtggtccgactcgcggccgtagggtccctcccggctcagctcggcctcctggcttcccgcccagggcctccgtgcgtccaggcccgccgagccgctggggtcccgggcccgatcgtggtagcgggcctgtttcctgaggaagtcctcggcgcgctgctggccgaggcgctggtccacggtgggctcggccgcccggctcttgttggtgttgttgttgcggttctcctgcgggtccaccaccagcggccggtccaagtgcgtcttcatgtctggccgcaggtgccgcgtgtaggcagccttccagcgctcgtccgggtccatttcgttatacagggcctcccggctggccagcaagttctgctttcgcatctcactggtccgctgctcccacacggacttggctggcttttgattcttctgttgctctttcctgcagtggcatggtcacaggacttagagcattgctaggcactgtagcttggatggatgacccaggcgaaccaacccacatctcagcctcccactcctgctctccaccctctactccccactgaatgctaggagtctgtgagcatctgagtcaggtcccagcctcctctgctcaagaaccctccatggctcccacctggctaggggcaaaagcccaagtcctcccccctgacccagaaggccctgtgtaatctgcttgtcacctccttgccttcacctcctcacacttactattcgattctagtcacacaggcctccttcacatcaggcatgttcctgcctcagggccattgcctatgctgttccctctgcctgggatgcccttccccaggccccccagtggctcctccctcacctccttcaggccatgtaaccttctaggtgagcagtccccaacctttttggcaccaggggccagttttgtggaagacagtttttccacagacctaggtgtggggggtggttttgggatgaaactgtttcacctgagatcatcaggcattcgattcttaaaaggagcacgcaacctagatccctcagatgcaccgttcacaatagtgtttgtgttcctatgagaatctaatgctgcctgctgatctgacggcaggtggagctcaggcggtaatgcttgcttgctcactgttcacctcctgctgtgcagccccgttcctaataggcctcggcctggtaccagtccacagccccgggactggggacccctattctaggtgatgccttccctgacaacttcgtttaaaatcacaactctcttcactcccagcatttgctatttccctcccctactttctctgtagttccatcgccttctaacacaatatataatttacttatttatctaatttattgactccttcccttgctagaatggctacacacaggtgggattttttttttcctccttgttaatgctgtatccccagaagttagaacagtgctgggtacataacagctgctaaccaaatatttattgagtgaaagtgggtggaaggacaagaagtgtctcttcctaaagctcagttctgtcaaggaccacccccactgcttcccaaatctgtgcctgggatagtgtggacgttcaggagccagggtagcatcccagggattaggggcacttacacagctatagacatgttggccgcggacagaggactcacttctgccacctccttggctttctgtagggcaagtttctggttcgctgcttcttcttcctcttgctcgtcctaaaaggcacgtggaatctttgttcacaaaacatgaactaggccttggggactcacttctgaccctgttgctgaccaggggcaacatttgaaatatttcgaccaatcagaaccaaggctccccaattggaatgggtacctgctattggttaagtgtattgctatcccctctgtgtataagtttgacatctaactcattatgaagcctattttaacacacagccagataacaaaaaataaaaatgtcccttctcttcctacaatgaagactttcctgcagcctatttttttttcttttgtttgttttcagagacagagtctcccttggttgcccagcctggagtgcagtggcacaatcatagctcactgtaaccttgaactcctgggctcaagcaatcctcccacctcagcctcccaagcaactgggactacaggtgcatgccactatgcctgtatacatttaattttttttttttttttgtagagacagggtctcactatgttgcccaggctggtcttgaacttctggcctcaaatgatcctcccatttcggcctcccaaagtgctgggattccaggcatgtgccaccatgcctggcccctgcatcctgtcttaatgagctggaaagcagtgcaaagattttcctctcactaggctttctgagccatgtgaactctctgaaccaactttcaaaaaacaccaactaccctcacacacagaagagcctggcatccgatggcccctgccatgcactgtcaacagcccccagaaggagaatgaggagaggaatttatattcccagcccccatgacaggaaggcggtggggagaggagagcagggcacttgggctacagccaactgcccagggtgctgctgctcactggtggttaggttcagagaggaggagaatgggggaagaggttttaaaaatacatacagaaaaagacgtttttggactttaaatccttcttcagccttcatgcagggcctcattcgtaaaacagaaaagccaacaaagaaaaagcaaagaaaaggcaacgagaaagaaatggccagaaatgaacccgcccataagaaaagtcatgccattgcaggcagctctcccgctgtgctccgaatcactggaacggggagcaaccttaccaccttggaaatggtcagatcaggacactgtcagagacaacatggagatgggatctggctggccaccctgctctcatagggccacccccacccctcctggcaccattcccagcatttttcagagctaggtctctggaccatctgcctcagaaacacctaaaatgcagatcctcaggctccccaaataatctatagaaccagtgctgggccctggaatctgcatttcccacaggttcccaagtgagcataaaacatgcccaaattcaagcaactggtacacagcagttaagagcacaagctgcagacccagacggcctgggttcaaatcccagctccacaacttactgctgtgtggccttgggcaagtctctcaacctctctgtgcgacacacatctcatctaaaattccaactctccctgactttccctactgaatttttctctgttgtgtttatcaccaactgacaagctacgtatgtttacaaatttatcttgtttcttgtctgtctcccctcttgaatccctgctccacggaggcagggatttttgcctttttttgttcactgcttaatccctaagtcctagaccagggccttggtcacacagtaggtgctcattaagtgcttactgaatgatgaaatctgtaaaatggggctcagagaacttggctcctaaggtttccatgaggactgaataggattaaaaacacgtattaaatgaccaagaaatgcttgtaggatcaatgaaagaaagaatgtggatctggagaggaatgtccacacctcccaggagataaacgaactggcctttctccctccccttctgctaccctcctgcaccagcccctaaggatggactcttggaacttggatgagctcatggctggatcagccctcggctcagccatgccagccagctccacagtggccaggcttgtggccgtgtgcttgggatggcagagacttccgcttccctccactgggagctggggccgggaaactctctctccctcctgccagggccggcagatggagcgttggcaacgtctgcttggtttggttcaatttcacaaacatgtcctgaatacctcgaggcactggaggtggggctgcaatgctgagggagaccccagggctgagaggaagaccctgtacctgttacatgtaatcttaacttaatagggtccttggggagaggcttaggctggacggaggctagctcttaacatgctgcgtttggctaaggggaggctccagcgggaagccagaggaagagagaaggtggggacatttattggccactccatctgtgccttgccatggttctgggttctctaaggtcccagggctggtggcagccctttttccttggccccagctctgactgggtccccataacagcactccctctcccatccactagcctgggggctacaccattccttggaaaccctgcttactccctgtaaacggccttttggttgagtttgccatccgtttcctgcagcgacctcactgccttcccccttcccaccctcttggctgtagaatttgcttgatgagggacagtctgtttctgggagtggggggagaggcgccttctctttgcatggtgcatccccggcaaaagttctaaccctgttcccatgcccccacccccacccccacccccacccccacccccgtcctgatctgccatgggcaggtggtaactttgccagagaaacattctcccaccgcctccaccttggtgagctcctgggcgttggccagattgtccacagcgatggccaagaacacattcaggagggtgtctgcaaatgtctgagtcaggaaaagcaaccactggtgggacaccacttgggccctgggtatctgggtctctcagtaccctcccttgagcccctgcaacctctcctctgccagaggtccaggcctgtccccttctctctctccatgaaggatacagttcccaaagagcgtcagtacaatgaaatagatggagaacaccatgccgccctgcacgcccccctgagacttgatcccgtcgtacatgacctcgttccagtcttcgcccgtcaggatctgaaaggggaggaagaaacacacagccaacccccctctcagccacgggccccttggagatgcagctgtggagccggaatccgcccaccccatccccgagcccaggaggtctttaacaatcctgcccggtttgcagagccagactccgtgttggcttctccttggcttttctctttgtttgcgagtagaaagggccgttcctgcgtcgtggggctcttagcctggcttctaggaaaatgggaccctggaggagtcacagaccctcctgtaactctgtcttacttgatgtgattaaggggatttgttatggactaaattgtgcccgcctccaaattcatgagttgaagccctaacctatgatgggatggtatttggagatggggcctttaagaggtaactagggttagatgaggtcatgggggacttcatgatggtattagtgcccttataagaacaggaagagaccgcatgccatggctcatgcctgtaatcccagcactttgggaggccaaggtgggaggatcacttgagcccaggagttcaagattagcctgggcaatatagcaagaccccatctttacaaaaaatttaaaaaaattagctggtgcccatctgtagtcccagctactcaaggggctgaggtgggaggatcgtttgaacctaggagtttgaggctgcagtgagctatgattgtgccactgcactccaggctgggtgacaaaaaaatgtgatttgcctaaaaaaaaaatagatttttttttgagatttttgtctcaaaaaaaaaaaaaaaaaaagaacaggaagaaacatcacaactctctctctctctctttgacatatgaggacacagcaagaaggtggctatctgcaagctaggaagagggccctcaccaggaactaactaaccctgctaacactttgatcttggacttcccggcctccagaactatgagagaataaatgtttcctgtataagccacccagtgtgtggtattttgttatggctgcctgagcagactaagacaggattttaatatttacctgtgttcctcatgtggtcatggtgatgattaaacaagctactacgtggatagcacaaatgtagcacaaggacacgtttggggtccccctgcctgaggcagaccctggaacaagggttcgggtgcaagtggtttgtctgggaggtgatctcaggaagcaccagtaggggagaggagaagtgagaaaagggaaaagagggtggaacgtaaacagtatgtgatcaagcgagtttccactgtaggtaaccggggcttggtcttgctggggagctctaggggtcatcccacctgagggtgagggagctggggtatttatccaccaacggctgctccttttaaggtgtggcacaaaaaattcacagtactgctggactgcagttccttgggggcagagcaggggaccagagaaagaccaaggcaaaggattaggtgttgacagacgcaagttgtgctgatgcatactgaaagaaccaaggggatattcaaacagcacctacatgctcctttaaaaaagatccaacttccttccttctatccatatccccatgaggataaagtaaatgttaaagaactccaaaaacatgaatctgctaaaacagggtttctaagcctcagcactgctgatatttggggccagattattctatttggggctgtcctgtgcattgtaggatattgagcagcattcctagtctccacccaccagatgccagtagcaccctctccctagctgtgacaaccaacaatgcttgcagacattgctacatgtccttggaggacagacttgtccttgggtgagaacctctgagctaaagatacatgactagcgatcagtgctattaataatcgcttatgggccaggtgtggtggctcatgcctgtaatcccagcactttgggaggccgaggcaggcagatcacgaggccaggagttcgagaccagcctggccaacatagtgaaaccctgtctctactaaaaatacaaaaattagccaggcatggtagtatgcacctgtagtctcagctactcgggaggctgaggcaggagaatcgcttgaacccaggaggcagaggttgtagtgagccaagaacgtgccgtcgcactccagcctgggcaacagagcgagactccatctcaaaaaaaaaaaaaaaatcgcttatgtgggggctcagaacttcccttcatggaaggtttcctcttcaactccctgtcttggggtctcatttagaaactacctccccaggagaaggagagagtgaagtcacattttctatacactctcagtccctcaaagagaaagaatccaccaaagatgctctgaaggtcccggctgggccagtcccaagcctcagggaatgcgcccacatgggtgcagaagttgctttgggttgatcaccctggaatatgagaccaaggtatcttcagatttgatgggtgtattagccattttttttctctgccttttttttaagagacagggccttgctctgtggtgcaggctggagctcacggcagccttgaactcctgggctcaagcaatcctcccgccttggtctcccaaagtgctgagattacaggcatgaaccacctcattggcctggccacgcattttattttctttattctgatgcatctggggtcttgctgactctggagggactgcccggtccagcactagccagtccctagaggtagtaaacaatttagccctgagcaggctttttaaaagcaaaccaaacaatatcccaaccagcccatatcccaaccacctcctttatcttcccagcactatccacctgccctaatcaccccaaggccaggtcctagacaagtaggaacagctcctctgccccagagcccactgaaatgatccaaactagccagtctcgagctgtttactctgcctcacccattccgtcccatggaaaccacaatcaagcctcttgcccacattttccttctcttcctgcttgaccctgttgcttctctgcttggtcctgcatggtgtgctccttctctgaggatctgtgagtataacaaactttcttttcgtttttgagacagggctttgctctctcgcccaggctggagtatagtggtgtgattgtagcttactgcagcctcaacctcctgggctcaagcaatccttccacttcagctgccctagtagctaggaggtatgtatcaccatgcccagctaattattattattatttttttgcagagacggagtctcactatgttgcccagacttgtctcaaactcctggcctcaagtagtcctcccatcttgacctcccaaagtggttttttttttctttttcttttttgagatggagtctcactctgttgcccaggctggagtgcagtggcgcgatcttggctcactgcaacctctgcctcccaggttcaagcaattcttgtgcctcatctcccgagtagctgggattacaggcatgtgctaccacgcccggctaatttttgtatttttagtagagatggggtttcaccatgttggccaggctggtctcgaattcctgatctcaagtgatccgcccacctgggcttcccaaagcgttgggattacaggtgtgagccaccgtacctggccaaagtgctgggattatgggtgtgagccaccgtgcccagccacaaactatctttccaatgacattcatctcctgatctgttggcctcaccataattgaataatgataaccataaaatctgtgtttcaaagtggtgtgaaaaggccaggtagagaaggaggagttcagggaagccccttggatgtggagcaggcactttcatctgtgacactgagaggtgttggcccgtggggccaggtggaggctgtacctgaaacaccgtcattattgctgctggaaaagtatcgaagttggtgggaggagtcccttcatcgaaattaaacctgcagggaggacacagacatttcacgttggccccacccggggtgctctgagggtgtggctcagtatctcatctccaaggaaacgaacgtctccatcatctctgtccccaggaaaccctgagtggtacccagggccctgcccatttgggtgaccgcaatgggtgtctgggctacgaggaaggcagcctgcacggtggaggggactgtgtgttccctgagcctgaccccagggaaccaggagttggaattcctgtgaaggacttactggccgccgaagagttgcattcccaaaagggcgaagacgacaatgaacaggaaaaggagaaacaacaggctgatgatggacttcatggagttgaggagagagacgaccaggtttctgagagatgcccagtacctgccgacagaggccaggcgaggactcaggccaggcgggggaggcagggccccggagtcagccctcgaaacacgaggctcactttcccaactttctggaggcggccccaccatgtcccccatccccaccccctgtacaaatgtccaggaaccccaaagacttactttgtgactttgaaaatacgcaataacctgagggctcgtaacacgctgattccaaaggatgtgccaggttttatgacagcccagatgacctcgaagatgctcccaatgataacctagggcagagaacctggtctcatgtccagggacagtgtctgggctccagaactggcaagcatttcctaggtaccaaccttgcaagaactcaaccaaactcctccctccaaatggaagccgggtgaggatccttgaccccctcattcatccattcatttatctatagagaccgggtctcactgtgtcacccaggctggagtgcagtggcgcaatcatagctcactgcagcactgtcctcctgggcttaagtgatcctcccacctcagcctcttgagtagctgggattacaggtgtgccccaccacatctggctaattttaaaacatttttatagagatagtgtctcgctagtattgcccaggctggcctcaaacttctgggctgaagccatcctcctgctttggtctctccaactgttggcctccactttccaaagcattgagccactgcacccggcctcttatttatttatttatttttatttattcatttattttgagatggagtcttgctcttatcacccaggctggtgtgcagtggcgcgatctcagcttactgcaacctccgcctcccaggttcaagcgattctcctgcctcagcctcccaagtaactgggattacaggcacccgccaccacgcccggctaattttttgtatttttagtagagacggggtttcactgtgttggccaggctagtctcgaactcctgacctcgtgatccgcctgcctcggcctcccaaagtgctgggattacaggcgtgagccaccacacctggcctcttttttatttattaagagctcccacaggcctgagaattcctgaaacacataattacaaagtgaatgtcatgcaactactacctatgtcaacaattaggagaaggctagggcagtggctcatgcctgtaattctggaactttgggaggccgaggtgggcagatcacttgagcccaggagttcaagaccagcctgggtaacacagggaaaccctgactttacaaaaaaaaaaaaaattagtcaagcatggtggcatgtgcctatagtcccagctacttaggaggctgaggagggaggatagcttgagcctaggaatttgagacaggagagggtcatgatcctgccactgcactctagcctgggcaacagagcaagaccctatctcaaataaaataaaaaataaaataaaataaaaagggacatgtggataccctggaagtttccagagacactgtgatataactaccatcctgaattttgtaataaccattttcttaccttaaaaaaaactgaggtgaaattcacataacataaaattcacactttgaattacacaattcagtgcctttaggtacatgcacaatattctgcaactatcacctctatcaagttccaaaacattttcatcacccccaaaggaggccctgtccccatgagcagttactccccactctccctcacccagaccctagcaaccactaatctactttctgtctctatggatttgcctgctctggacatttcatacaaatggaattatgcaatacttgaccttttgtgtttggtttcttttaccgagcgttgtgttttcaaggtcctcgcctttttaacgtattcaagtatcatccttaaaaaatacagtttaaggcggggcgtggtggctcacgcttgtaatcccagcactttgggaggccagggcaggtggatcacctgagatcaggatttcgagaccagcctgggcaaattgctgaatcccggtctctacaaaaaatacaaaattagccgggggtggtggtgcatgcctctaatcccagctacttgggaggctgaggcgggagaatggcttgaacccgggaggtggaggttgtagtgagccaagattgcgccactgcactccagcctgggcaatagagtgagactctgtctcaaaaaaaaaaaaaaaaaaaaaaaaaaaaaaaaaaaatatatatatatatatatatatatgtagagagagagagagagtttaattttgtccacttgaactttgcatgaactgtatggacttacgttgctagctcctgcctccttctgtgccatgttacatgggtgagattcattcctgttgttgggcatgtggctgctgttggtggactttgattgtcacagagtatttcattatatagatatgccacaaaatatttatctgttctacagcaaagggatacacggatattgagacttggaactattacaaacaaggttgctcaggacattttaaaatttttctttttttttttttgagacggagtctcattctgtcacccaggctggagtgcagtggtgcaatctcagcttactgcaacctctgcctccccagttcaagtgattctccttcctcagcctcccaagtagctgggattacaggcatgtgccacgacgcctggctaatttttgtatttttttagtatagacggggtttcgccatgttggccaggctggtcttgaactcctgacttcaggtgatccacctgcctccgcctctcaaagtgctgggattataggtgtgagccactgtgcctggcctacttttatttcttagagatggggtctcactctcttgtccaggctggagggcagtggtgtgatcatagctcactgcagcctcaaactgctgggctcaagcaatcctcccaccttagccttctgagtagctggggctacaggtgtgcaccaccacacctggctaattattattaatttttgtagagacagggtcttgctatgttgcctgggctggttttcaactcctgggctcaagcaattctgctgcctcagcctcctgaatagctgaggctataggcatgaggcatcacacccggctttcttttctttttaatggaaagaaattggttttattctttaactacttgggtcatttatgtagggaaggtttgcttgtttgtatgtattttgttttctccaacaacataattttctataatggcagaaaacagtacaacattcagttattataaattattaagctggctgggtgtggtggctcacgcctgtaatcccagcactttgggaggccaaggcgggtggatcacgaggtcaggagatcaagaccatcctggctaacacggtgaaaccccatctctactaaaaatacaaaaaattagccaggtatgatggcgggcacctgtagtcccagctactcgggaggctgaggcaggagaatggagtgaacctgggaggcggagcttgcagtgagccgagatggcgccaccgcactccagcctgggtgacagaacgagactccatctcaaaaacaaaaaataaaaacaaaaaataaaaaaaaataaataaattattaagcctttctgagaccaacaggactatggtaaatgattagggctgccctgggccaggcattctccacttatttgcgaacaaccttaatttcacttccagctgcagggacattctggcctgtgtctcctaggtatctgggtgagattttctaggatgaattcctagcaatggaatgctgggtcatatctccatcttgtagtttttgccctggttcgatgagaaggattggacgtagattattctccaggacttaggttttgtgtggactagtgggttactgggtgttaatcacatttaaaaaataaattaattaactgagtaattcacaaaataacaaaggaccataatggctccataatgccagggtgttgtaatctaacaattatacttcatctacctccacatgactgagctacaaaggaaaagaagaaatagaaatcatattgatgtcctgtttgtaatcctgaagttgggtacttagttggagcgacacaggcaacccacctaaggcatggcttttctcccaacttggaaaacttgtcttatgtcccccacttagctttccaaagggggtctatacgttttcctcccactggcggtggttgagggttctgggtacactgtatccttgccagtgtttgggattgttttctcattccttctgcatccatctgagtctctcatattcaggggtgactttacctttctccctttaatgtgtccaggtatctgtcattccaggcaagagctggagaaatgaactcttagaaacaagagcacttaccccacagtcaaagcagttgaaggaagagtggaagtaaggccgcgtcccaagcccgtacatttttataaacatttcggacataaagagtcctaagaaaatgaattctgcatagtctagaagggagaaggaggaaacagagaggaggttaggcttgctgagggtaggggttccaggtggctctgactttccttttattatcatttttaaactttttattttttgtagagatgaggtcttgctatgctgttaggctggtttcaaactcctggcctcaaacagtttccctgatttggcctccaacatgctagaactacaggcatgtgtcaccacacccaacttctgacttatcttttttctttttaaaatttttatgtggagatgggggtctcactatgttgccctggctggtcttgaactcctggcctcaagtgatcctcccagcacagcctcccaaagtgctgggattatatacatgacccactgtggccacgccctgtccaaggtgtccttcccatgggcctcagtttcccctctgttaaaaaggaagagctggctgggcatggtggctcacgtctgtaatcccagcactttgggaggcctaggcggtcagatcaactgaggtcaggagtttgagaccagcctggctaacatggcaaaccccgcctctactaaaaatacaaaaattagccagtgtggtgacacatgcctgtaaacccagctacttgggaggctgaggcatgagaatcacttaaacctgggaggtggaggttgcagtgagccaagattgggccaccctactgtagcctgggtgacagagcaagaccttgtctaaaaaaaaaaaaaaaaaaaaaaagcaacaattatgccctaccctccaaccaacaagctaaccaaccttaggccgattttaaaaggaatgagaaaaatatcagtgggtctccatcttgtagtttttgccctggttcgatgagaaggatcggatatagattattgccaaggacttttgtgttgactggtgggttcctgggtgtttatcacatttaaaaaataaactaattaactgaataattcacataataacaatggaccataacggccccataatgccagggtgctgtgatctaacaattatatttaatctacttctacgtgactgagctccaaaggataaaaggaaatagaaatcataatgatatcctatttgtaatcctgaagttaagtacttagttggagcgacacaggcaacccacctaaggtatggcttttctcctaactcagaaaacttgtcttatgtcccctagaaatcctgtgttgtgagtgacctaaaaagtcttgagtaagacaaagccttttgttctttgatgagcaagcataaaattgcaaatgcctcagggaggggtaaaacatggatatgcatttgctccagcaaataaatggctgacatcagatccttttctgagagggctttcttggtagggtaggaagatgaggagttaggaagggcgtgggtacttaatggatagaaaggagagatgaggagggtttctgaggagcagaaagcatacagaaaggaaagagacagaggactgaaactaacttccatgaatttcatatagctaattaaggccacaaagctaattgtgtttggtggttgtgatggtttaaatgtttgtgtcccctccaaaattcacgttgaaacttaattgccaatgtaacagtattaagaggtggggccttcaggaggtgattaagtcattacggtagagctctcatgaatgggattaggtgcccttataaaagaggttgacagaggaagtttgtccctcttgctcctccaccttctgccatgtaaggacccagtgttcctcccttccagaggatacagtgttcaaggtgcaatcttggaagcagagagtagctttcgccagacagggaaacctgccaatgccttgatcttgggcttcccagcctccagaactgtgagaaaataaatttctgttcttatcaaattacccagtctcgggtaatttgttatagcagtacaaatgaactaagatatttgccaagggtgtttgctatgtcatgcttttaagaggtgttttgaactgaccgtcaaagtccttcacagtatttatcaccaaaatttctccttatttataggacgctaaggagatcttagtgtctgaggggaactctagggttcctaggaccaaaatatcagcagaggaagtctgtttgtaacatctgacacattcctagacccaccagaagtaactctgggaggactgaagagtttctgagatcttgttcctcagttaccatggaaacatgatagcaggtgatgcacaagacttgaaagaattacttatccttagcattgttgcatctggaagaactttcaggaccatcaaatccggtttctaccacatagatgtggagtctgagatccagagaaacaactacacttcactgatgccaagatatacatttttgtttatattttgacatctctgaaattaatgtgtatctttttttttttttttttttttttgagatggcgtctagctctgttgcccaggctagagtgcagtggcatgatctgggctcactgcaacctctgcctcccaggttcaagcgattctcctgcctcagcctcccaagtagctgggattacaggcgcccgccatcatgccaagctaatgtgtgatcctgggcaatctacttaacctctctgtgtctcagttttctcaaagggaaagtgggaatgagtaaaggacctttatagacactgaggacccaggcaggaagtctcagtcccttgttcctgaaccaggacagactgtacaagatgattagtagagagaatataggagattaaaaatagagtattagaggaagttaaaacacgaagtagagtcctcatttataagagactccagagggactaaaaacaattactaagtttgaaactaggtcagggccctgggaaggagaactggttcctgaggggtgtcctggggggtcagccaacgtgactgggaacaaggagggttataagaagacaatggcctggactaggctcacgggcctttctaggtcaaagactagactgtctcttcttgctgtcctaagtcaattctgaaccaggtcagaaggtcagtgaataaattagacagccagtaggcaaaagacgttttgagaagtccttacttggggcctgtgagccaaagccagggcatccacctgcccccctcactgcccaatcactactctttattttattttattttattttactttattttttgagacagacactctctctgttgctcaggctggagtgcagtggcatgatcttggctcactgcaacctctgcctcctggattcaagcagttctagtgcctcagcctcctgagtagctgggattacaggtgtgcaccatcacatctggctaatttttgtattttttgtaaagacagggtttcaccatattggccaggctggtcttgaactcctggcctcaagtgatccacccacctcagcctcccaaaatgctgggattacaggtgtgagccaccatgcctggccccagtcgctgctcttgttgattcctcgagctctttactttttaaatcctgctcagacatctccccatcttttgctgcttttcctcaccctcacttggccctcaattttgatactatctcatgctaactcacatagaatctgggaataggcccagagggcaaagccttagtgggccttgtaccttgagggagcaaaacgctctcgcagatactggaggggatgttctatgaatgaataaggaagccaaaaagggcaggggaggaagtattaggttggtgcaaaagtaactgtggttaaaaaaaaaaaaaaaaaaggcaaaaaacgcaattaattttgcaccaacctaacaggaaagaagcagaaggtttgaaagaagagagaagtagagtcagaaataagtagagaaaatgagggcaacatataagccactccttatttctaaggcatcctctcttaaccataagttatgaacatttccagagatgtacataaaaattattaatacatgtatgtttctgtttctatctgtctatcttatgagctccgtctttctctgtctctcttccaacatccccttcaccagcacccctctgtccctctctcttagaaaggaatcacaggagcatttgttggtctgaattccagcttccagctctcaggtctaagggagatgggttccattgtcatagcaacagtaacattggccccagtgacagttatagaaatggctaaaggaaagggcagattcaatgaggaccaaagaagatacacatactaccagagaaagagaagtggaaaaagggtgtgagggagggatcagggagttggcaggggtggggctgggtgatactcacaaaggaagtcggagagccactcgggctggttgtagtgaacaatagcaacacacagcgtgttgagagctaccaaactgagtacagtccagtagaaggcctgagttttgaccatgcggcggatgtagaaacgcatcctcctctcctttttgtgaaaaaaggtcgagttctccagcttggcacttttaatgctggctcgggcgaagggagaacctgccagggaaaagatggagaatgtcaggctcaggctgttccttcagaagaaattaaccaatgtgcagcccaagcacagattttagccaggggatccattagtctctccagcaagcctctggcctgagggaaccatcatgacccatgggcttagttttgcatagatggagcttatgagaagacagtgcccctgaaaaataacagaattagaagtaaccaattgatgggaaggctgatagttctctgttgcaggagccaattttccatgtctcccactcccagccacatctgatgcctctgggagtcacaccacagggcaggataaagcagagcctccattccctgatgcaggggcaggcaacagagctgcatggagcacgcttggaaggcctccagaaagagatgtggatgagactgttttccatggacatttaactttagaagtgatcactgaggaataagctgggtgtgtcctctgcctacatatagttttgctcttatgcatttattgagtacctattttgtgccaggctctgttccaggggctcaggatacattaggcaacagagcctggacttccggggtctgaccctctaaggggaggagacagacagtggacgtaataagtaaattaacagtgggatggaaaatgaaaagtgctatgggaaaaaaaaagttgggatgggtgcagtggcacatgcctctaatcccagtactttgggaagctggaatgggaggactgtatgaggccaggagtttgacaccagcctgggcaacacagcgagacaagttcttttaaataacaattttttttttaagagaaaaagtaaagcatcacagagggactgggagcccttggagagtccacagggtaggctgcaacattaaattgcatggtcaaggtgagtgtgttgacttgtcactttagtatcttaggtagaggaaacagcaaatttaaggtcctgaagcatgaatgtgtctgcccgacatttttggggaagagcacaaggaagtcagtgtggctggagtggagtggttgaggggaaaagaggaaggtggtgaaggcagggaggtgacaggcagatcatgcatggcctggtggaccacaaggaggactttggcttttaccctgagtgaggggggagccgtggagggttctgagtagaggagggatggaacctgatttgggtgttcacaggcaccctctggctgccgagtgggagagtagacagtgagaggtgaggacgggagctgggagaccaggctggaggtgactgaacccatccaggcaagtgatgatgatgatggatgggggctggagttgggtggtagttaagcggggaggatttgggatgaatcatttaagacagattcaacatttgctgatggaacggtgtggatgtaagagagagggatgagccaaggtgaatgaatgatgtacatacaaaggaatggatgaattggtgaaccccttaagggatggagctctcatccactgaatgggcacaggtttaggggaaggtcagagctcagttttggacagattgaatttaccttctaaaatacatcttttttttttttttttgagacaggatcttgctttgttgcccaggctggaatgcagtggcttgatcctagctcactgcagccttgaactcctgggttcaagcgatcctcccacctcagcctcccaagtagctatgactacaggcacgtaccaccatgcccgcttaattaaaacaattttgtttttggtagcaatgaggtctccctgtgttgcccaggctggtcttgaactcctgggttcaagcgatcctcccgcctcagcgtccctaagcattgggattccagcatgaattaccatgcccaggcttaagataccttttcttataaaccctcagttgcattcatttttaaatggttcttcattgattgattcattcattagtacattcattcattctttcatccatccatttgttcatttattcattcattctttcatcattcttaaattcattagcacattcatcatttatccattcctttgtgtgtacatcattcatttgctcatccattcatccatccattcgctcatccattcatccatccattcattattcatttgctcatttgtttctccattcattcctccatttatccattcacccatacatccatccagcacgtttatcaaaaccaccccacttgccagacacaggacacagcaaacacctccaaggaggccacttcctatcagcaaaattctcaacagagattttgagttggcaccctaggggccataccgactcatactgggtttgtgaaagctgaaattattggtccacatttaaaaactgggagattttccatgaaaatatggatttcagcttcccctgaatgaaaataacagctgacgtttatggaacatttagcaggcaccaggcactgcagggaacatgttttatacgacaagctacttactcctgctcagagccctaggaagtagggaccagcgtcatccccattttacagccaaggaaacaggctgaggggggtctagtaaccagtgaagatgtgtcaagatggttcagagtgtgtgctctgggccgccacattgcacacctggggcatatggtcatggggcaggggcacattccactcggctgcagttggccaggcccagtggctgtgacctgcttacagggacgcctctcctttctgcaaagacccttcccctcatgtccatcaccttctcaaccccagtggcagctcctcatgaccctgcccagcatttctggccctagttcctgaaactctcaaagatgtgtccagatctgcaggtctccaaagggcttggccaaaagaaataagacccttgggaccttgggggacaggggggatgttccacagatcgagagagagagagagagagagagagagagagagagagaaaccacagcaggtagaaggtccccagcccccactcctgctggagccacactgaaaacctggcttaatcaccaaccagcagatgaccttgggcaagccaccttggtaaactggagacaaccacacttcctacctcaaagggccatccaaaggcataaatgaattaatacatcttagcgtgatgctaagtggtaccttacgattattggatataaatcttctagtacaacctcaagagctgaaatcatgactaggttcacgtgccagccattgagaaagtccttcctgatcactcagcctgaagacacattccccacgacaggcatacccttcactggtaagggagagggaaatgaatattaattgaacacctactaagtgctggaccccatgctaggcactgtcacttctgttagttgaatttcatactcactttgtcccacgttccctttttctatacattcctgtctctcgtttttctctgtggtctggaattataattgcagacaatttctagatttttaaaaatcactttcatgagatgttttattcaacccaatacatccaaaatattaccatttcaacatggaatcaatatcaaggtggattcaaaagatattttatactctttcttttgtactaagtattcccagccggacgtgttattatgaagtacatcctagttcagggtcagccacattcaagggatcaagagccggtgtaactggtaccagtctgaaatgttcttttcctttttttttttttttcttttttttttgagatagagtctcattctgtcacccgggctggagtgcagtggcacgatcttggctcattgcaacctctgcctcccaagttcaagtgactctcctgcctcagcctcccaagtagctggaactacaggtgcccactaccacgtccgaataatttttgtatttttagtaaagatggtgttttgccatgttggtcaggctggtctcgaactcctaacctcaagtgatctgcccgctgcagcctcccaaagtgctggcattacaggcatgagatactgggcgtccgggccagtctgcaatgttctatggtgggggaaggggtatgtcaccgccaaggattcatctggtgatttctggcaatttatatacgcttaaaattatatgtaaattgtaatacagccatgtgtggcttaatgagggagacgtgttctgagaaatgcattgttaggcaattttgtccttgtgtgagcatcttaaagtgaacttacataaacctagatgttgtagcctactccacacccaggctacgtggtttgtagctcctcggctacaaacctgcccagcatgttactgtacttaatactgtaggcaactgtaacatcatagtatttgtgtgtctgaacatatctaaacatagaaaaggtacagtaaaaacacagtataaaagagaaaaggtggttcagctgcatagggtacttggcatgaatggagcttgcaggactggaagttgctcttggtgagggagtgagttgagtggtgagtgaatgtgaaggcctaggatattattgtacactcctgtatatattataaacactgtatgctcaggctacatgaaatttacaaaaaaaaatttacaaaaaaataaagtaattagggccaggtgcggtgggctcgtgcccgtaatcccaacactttgggaggccgagatgggcagatcgtaaggtcaggagttcgagaccagcctggccaacatggtgaaaccccgtatctactaaaaatacaaaaattagccgggcatggtggcacacgcctgtaatcccagctactcgggaggctgaggtgggaggacggcatgagcctgtgaggttggggttgtagtgagctgtgatcgtgccattgcactccagcctgggtgatggagtgagacttgtctcagaaaaaaaaaaaaaaaaaagaaatcgcatacagaaacacagaaagaagaccatatgacaacagaggcagagactggaattatgcatctatgaactgaggaacaccaagtatcgctggcagcaccagaaactaagaaaataccatggaacagattctcccctaaaaccttctgagggaacgtggtggctctgctgacaccttgatttcagtttggacttctggcctctagaactgtgagagaagaaatttctgttgttttaagccactgggtttgtgacattttgtaatggcaactctgggaactcaataccacccatatagagcctgtgttattaaaatgatgtaaatggatccccgtttccccacatccttgccagcacttgttatgatttgtcttttttttttttcttgtaagatggagtctcactctgtcacccaggctggagtgcagtggcatgacgtctgctcactgcaacctccacctcctgggtttaagcaattctcctgcctcagcctcctgagtagctgggactacaggtgtgcactactgcacccagctaatttttgtatttttagtagagatggggtttcaccatgttggtcagcctgcttctcctcttataaagacagcagtcattggatttaggacccaccctaattaagtttgatctcatcttaacttgattaccacctgcaaagaccctattttcatgtaaggccacatttgcaggtaccaggggttagaacttcaacaaacctcatttgtctttttgataatagctactctaggctgggcacagtgtctcacacctgtaatcccagcactttgggaggccaaggagggcagatcatttgaggtcaggaattcaagaccagcctgaccaacatagtgaaactaaatacaaaagttagctgggcatggtggcgtgtgcctgtaatttcagttactcgggaggctgaggcaggagaatcccttgaacccaggaggcagaggttgcagtgagctgagatcacaacactgcgctccagcttgggtgacagagtgagactccctctcaaaaacaaaacaaaaaacaaaaaacaaacaaacaaacaaaaagataatagctactctaacaggtgtgaggtgatagctaatggtggttttgatttgcatttccctgatgatgagtgatgttcagcattttattcatatacctgttggccacttgtatgtcttttcttttgggatatgtatgttcagatcctttgcacatttttattttttattttgagacagggtctcggtctccttctgtcgcccagggtggagtgcagtgatgcaatgtcagctcactgcaacctcctcctcccgggctcaagggatcgtcacatcttagcctcccgagtagctgtctttgcccatttttaattgggttgttttcttgctgttgagttgtttgagttccttatatattttggatattagctccttatcagatgtattgtttgcaaacgttttctcacattccttaggttgtctctttcctctgctgaacgcttcctttgctgtgcacaaattttttagtttgatacgatcccatttgtccattttggcttctgttgcctgtgcttttgaggtcctgtccaaaaaatcattcccgagaccaatgccatggagctttctccttatgttttcttggagcatctttaccatttcaggtctgacatttaagtcttttcagaacatctgcactcccacgttcacttcagcattattcacaatagccaaaatatggaagcaaactaagtgtcccacaatggatgaatggataaagaaaatgtggtatgtatacaaatagaatactatacagccctaaaagaaagaaattctgtaatgtgtgacaacagggacagaactggaggacattatactgagtaaaataagctggcacagaaagacaattacagtatgatctcacatgtgggagcttaaaactaaaaaaaattgatctcatagaaagagcaggaaggtggttcctggaggctgcaggggaggaggagggattgagaaggagaagatgttgatcaaagggtataagttgcagttagactggaggagtaagttttagtgatctattgcattgcattgcattgcatcgcatttagtgatgcattaatacattattgtgtatttatattgcattattaataaatagtaatgtgttgcatatttcaaaattgctaagagatttttaatgccttccccacacacaaaaaacggtgaggtggtgaggcgatggatgtgttaattagcatgactgaatcattctatgatgtatacatagattaaaacatcacactgcactccataaacatacacaattaccatttgtcagctgcaaataaattaataaaaaatcatgcctgtaatcccagaactttgggaagccagggcaggaggatcacttgaggccaggagtttgagaccagcctgggcaacatagccagaccccatctcaacaacaacatcaacaacaacaacaaattagctgggtgtggtggtgcctgtagtcccagctacttgggaggctaagctgggaggatcgcctgagcccaggagctccaggctgcagagagctatgatcatatcactgcactccagcctgagtgacagagcaagaacctgcctttaaaaacaaataaaatcatctaaatggggtctggttttcctaaaaaagcagagttacaatggcagcttccattcataatggatcaacttttttttgttttgttttcatatgctccacattttacttatttatcattgtgcttcttcttcgtcttcttcttcctcttcttcttcctcttccccttccccttcctcctcctcttcttcttccccttccccttcctcctcttcttcttccccttccccttcccattcctcctcctcctcctcttcttcttcttccttcttccttcttcttctttcctcctcttcttcttcttcttcttttttttttttttaatacaggccaggtacagtgtctcacacctgtaatcacaacactctgggaggccaaggtgggaggctcatttgaagccagggttttgagaccagcctgggcaacatagcgagaccgtgtctctatcaagtattagctgggcactgtggcatgcgcctgtagcctcaaatgatcctctcaccttggccttccaaaacattgggattataggcatgagccaccgcaccaggcctgtattattgcattctttacagaaataaataaaggctcactctatcacccaggctggagtgcagatcttggctcactgcaacctccatctcccaggttaagtgatgcctctgcctcccaagtagttgggattacaggcgcccgcctccatgcccagccgatttttgtatatttattagagacaaagtttcgccatgttggccaggctggtctcaaactcctggcctcaagcctgtcttggcatcccaaagtgctgggattacaggtgtgagccaccgtgcccagccatactgttatttttctttttaaagttattattcatttattttaaattgacagatacaggctgtatctatttatagtgcataacatgatattttgaccatatgtatacactatggagtggctcagttgagctagttaacatatgcattattacatatgcttatcacttttctcacggtgagaatgcttaaaacctactctctgagcaattttcaagtatataatacattgttattaatacagtcgccaggctgtacaaaatagatctcttgaacgtattcctgcagtctaaatgaaatttgatatcctgtcaggcgcggtggctaacacctgtaatcccagcactttcggaggctgaggtgggcagatcacttgaggtcaggagtttgagaccagcctggccaacatggtgaaaccccatctctactaacagtacaaaaattggcagggcgtggtggtgtgcacctgtagtcccagctacttggaggctgaggtgggagaatcgcttgaacctggaaggtggaggttgcagtgagccgagatcgcaccactgcactcccacctgggcgacagagtaagactccatctcaaaaaaaaagaaaaaaaagaaaaaaaaattgatatcctttcagcaacatggctcaacttttcatgtaaatgattcaagttccttatttcagcagtaagttcatcaattaggaatgaacctgctttatagtgcgtttatcaactgattcaacagcgcagtagaatcaccaattatataagactgcatgtgggccaggtgtggtggctcacgcctgtaatcccactgctttgggaggtggaggtaggaggattgtttgaggccaggagtttgagaccagcctaggcaacatattgagatcccatctctagtaaaaaatataaaaaacttagctgagtgtagcagtgtacacctatagtcccagctacttgggaggctgaggtgggaggatcacttgagtccaggggtttgaggctgcagtgagctatgcctgcaccactgcactccagcctgaacatcagagcaagacactgtctcaaaaaaaaaaaaaaaaggactgtgcatactgtggtataatgtgaacgtgaacgcaaataccacatagctcccaccttactttgaaatatgcattactgtattattacttttttttgtttttttttttgagatgaagtctctgtcacgcaggctggagtgcaggggcatgctgtggctcaccgcagccttgacctcctgggctcaggtgatccacctcagcctcacgagtagctgggactactggcgtgtgccacaatgcccagctaatatttgatagagacagggtctcactatgttgcctaggctggtctgaaactcctgacctcaaacgatcctcccacctcagcttcccaaaatgttgggattacaggcgtgagccaccacacccagcctgtattgttgcattctttacataaataaataaagctaaatgtgattccttgccagaatcctggaattccagagatctcttttggggtggtctagaaaaccactggctagattgggggctcctttctttgtctttttgagtaatcaggctgatgaggtgggttttggtggatttgcctgtagcaaacgtggctatgaaagaacaagccactggcctgggttttgggtctgtttagaaagctgcaatgtcacctgccttgttaacagaggcggaggctgcagtgagccgagatggcaccattgctctccagcctgggtgctagagcaagactccatctcagaaaaaaaaaaaaaaattaaaaaaattaaaaatatatatacatatatatgtatatgcagattttttatttttttgatggagtttcactcttgatgcccaggctggagggcaatggcgccatctcagctcactgcagcctccgcctcccgggttcaagtgattttgtgcctcagcctcctgagtagctgggattacaggctcacgccaccacacccagctaattgttgaatttttagtacagacacggtttcaccatgttggccaggctggtctcctactcctgaccttaagcgatctacccgcctcagcctcccaaagtgctgggattacaggcgtgagccaccgcgcccggccagcaaagtagatttttaagaatgtatgttattttatttttttaagagacaggttctcactctgttgcccacgttgcagtgcagtggcacaatcatagctcactgcaaccttgaattcctgggttcaagaaatcctcctgccttagcttcctaaatagatgggactataggtgtgtgccataatgcctggctaagtttttcaacattttgtttttcagagatggagccttgttatgttgcccaggctggtcttgaacggctgatcttaggagatcctcctgcactggcctcccaaagcagtgggattacaggcgtgaaccactgtacctcgtcataaaacagattttaaacaatggaggtaacgtaacacgtgagacagacataattgatcaaatactcaagacacctactgagcgctccaattcttgacatttgcttacaggaaattaaacagatgcacacacgagtggaagcagaatgagttctccattacaaagaaaagcgtgttttggctggaaattaaaaatgcaaatgaaaacaagctttaaggtttcattacaaacccacttaactgggaaaggaaattaaattggtaatattcgatggcctgggtggggaatccatgaacatatgcatacttggcaggtttataaatgggttccatgtttttgaaactcagaatggctctttgaataatgagttgaaaagctgttaatatctttgatcctataattatccccaaggaaatacgcccaaagggtggggggagtcattgtacgtaaatgtgcacagcagtgttcttcgtaagagaaattattggaaacaactcaaacaccctataatagagctatggctaaacaaaccatagtgtatccaccctacgagatatgtgatcgcaatggaaattatgcctaaactcagcaataaggttataaactaggggcgagcgataaaaggggaatacgaaatagtggatcagaaactatggatcagaaacacatggatgtactaacttccctccttccttcacttctctccctccttctcttcctcccttcctctttctcttgccatcctttcttcctctaaactgcggccacacagtttcccaagcagcctaaattccttctcccctcaatcttattccagtcttatttcctctgcctggatgctcttccttccattaaaaacaaaaacccattaaagaacaacaacaacaataacaatacattctcactttagaaggtcaaaatcaacatcatcacagccaatgaatcaataggacagaggagtgagaagggaaagaataaatgttccctcctccctcgaactctggcccttgtggtggcaaaggtctgagccctgcctctcacactgttccttctgctatcaccaccacagtgatctcctacccatccttcagttcccagcttaaccgtcacttcctccaggtagccttccctgactgctccccatccttctagagcaagctaagcccagagcctctccctgaagtgccattaccattacaggtttatttgtgtaattctctgtttaatttctatttcctgcactggactgtgagctccatgtaggtagggatttggtttgtgtcttttttttttttttttttttgagacaggatcttgctctgttgcccaggctggagggcagtgatgagatctcagctcactgcaacctctgcttcccaggttcaagtgatgctcccgcctcagcctccagagtagctggaactacaggctaatttttttcgtatttttagtagagccagggtttcaccatgttggccaggctggtctcgaactcccgacatcaggtgatccgctcatctcagcttcccaaagtgttgggattacaggcgtgagccactgtgcctggctcagtttgtgtctttttttttttttctgtgcccaggctggagtgcagtaacacaataatggcttattgcagcctccacttcccaggctcaagtgatcctcccagctcagcctcgtgactgccttgtcttgtttgcaaccaagcacctaatataagcaggtcccccatgaatacttcccgaatgagtcacaaacattcaccaacttgactgggagcttcgtccctgccaggtgctggtttgccatgcttcatggggatcatttagttgaattcccacaaaataatgagaagctaggcacggatgttattcccataatgatgtaatctgcccaggacacacgcacaggtgggaaagggtggagctgagacccaaatccaggcagcacggtttgcaagccctctgcccccaccccaccatgtctcttgggcgataggtgatgaacaactgataggtggcagaggaagggactcacccacagaggctatatcagccagctgatcctcagcctcttcggggttgagcaaatctgtcttgcttttctttatggtggttctccgcagagctccaacaatggaaacatggcaagagaaaaagacgttaccctttttgcaacacagaccatatggacacagtgtgtccttggatttaactctcacggcaactgttctcacgggaactaatagtatacccatttttcagatgtgtaaactgaggttcaaggtggcactatcactttgcttaaaggggtaaagacaagaatcaagtcgggttcagtccgactccaggtctgggccctcagccactattttccttctggtttatttatttatttgtttatttattttgagacagaatcttgctctgtcacccagagagtggtgtgatcttggcttactgcaacctctgcctcctgagttcaagcgattctcctccctcagcctcctgagtagctgagactacaggcatgcaccaccacgcctggctaatttttgtattattagtagagatggggttttgccatgttggccaggctggtcaaactcttgacctcaagtgatttgcctgccttggcctccaaaagtgctaggattacaggcgtgagccgccccactcagcctctatttttaaattctaagaaacctcactttcttatgaaaacagtccaccccttgacctgtagcatactcgctaggcaggctgcaattttgggattctgcccccatattcaagctatacaccccaggggctccacagcagacaagttcaggtgtagacttccaataaaaagatttaggtaccctaaatgagttagattacctaactcatttaggggagttaggtaatctcccctccccaactaagataataaaattcattttataaccttctgggacgcagtgccagttcttttatttccctcaaatctctcagatttttaatcaaaagtcatcaccctgtctaaccagctttctttcttttttttgagacagagtcttgctctgtcgcctaggctggagtgcagtggtgtgatctcggctcaccgcaacttccgtctcccaggttcaagcaattctcgtagtttagcctcctgagtagctgggattacaggcgtgtgccatgacacctagctaatttttgtatttttagtagagatggggtttcgccatgatggccaggccggtcttgaactcctggcctcaagtgatccacccgccttggcctcccaaagtgctgggattacaggcatgagccaccacgcccagcccctgtctaaccagttttctaaagtatgagaagataaatctcaagcaagaagttgcatttttcagggagtactattatttttcttattgctgttattattatattgcagacatattattctggcctatctctaaattctttttttttcttttgaaacagggtctcactctgtcacccaggctggagtggagtggtgcccactgcaacctcgacctcttgggctcaagtgatcctcccacctcagcctcctgagtagctgggaccataggtgcgtgtgcccccacatctggctaagtttattttttgtagagacggaacctcattatgttgcccaggctggtcttgaactcccaggctcaagtgttcctcctgtcttggcctcccaaagtgttgggattacagatgtgagccacagacagaccgcatccaaccctatctctaaattctaggaaactttactttcatgaagcctcaggttggatacacagtgactcttacagtctgtcccctgactcccagctatgctggggaggttgggcttttggacacctttttaatggtccctcctttcatattcaggtttccaggggaccatgaattgacatctacactcccagcattttgggaggccaaggtgtgcagatcatttgaggcaaggagttcaagaccagcccggccaacatggcgaaaccccatctctatcaacaatataaaaattagccaggcatggtggctcatgcttgtaatctcagcttctcatgaggctgaggcagagaattgcttgaacctgggagccagaggttgcagtgaggtgagatcgtgtgactgcactccagcctgggtgacagagcgagactctgtctcaattaaaaaaaaaagaaaagaaagaaagtcatggttctgtctcgttaagtttctaacatgggagacagcagccgttcacagtaaactggattattggtggaattattacttatttagcaaacagaaacgtgctgaccccatgccaggcactatcccaggtgttctatttgccataacgaatatcattctgagaaacaatctcgtgagctagggtattgtttatatcatacccattttgcagatgagaaaaaccaaggcacaaagcagaaaaaaccaggtccatggttaaaacaaaaaagtggaggccagaatagggaaactctgcatggaagtcctaaaattcctccaagaggaacgtctaccctctgcaagatccttagaaccagtcacctgctctcccccgactccccaccacagcttctcccttctcccctgggacccacccctgaggtgggtttagagcagttaccatcaaagggatgcctctgctccccgtcagtttcatcctcggcgaggatcacctcttctgaagaggaagagcacagagttaagctcctgcatttggaggatgagttctcccttggaccaggaagaagggtctgcccggccacccccattctctgctgactgatggtgacagctcaaccgaccaaaaaacatgctgctgggtggtttgtgacttcaagccccacctccgcaacagtagcaatagccaacattctccccacctcgcgcaaaataaaaaccaatgtccacaccacagcctataagcccctgcttgatctgatctccatcaccttcctgtcttcctctcctccagctgtccccacctctcactctgtttcagctgcactggcttccttgctgtgtctcaaatacgttcctagctcagggcctttgcacttgctgtctctgcctggaatgccccttcccttgacatccccacagcttccttcttcacgtccttcaggtctctctgctcagagggtacttccttagagaagccttccctgaccaccctgcctctaacttcctactcttttttttttctctgacacagagtctcactctgttgcccaggctggagtgcagtggtgcgacctcagctcactgtaacctctgcctcctgggttcaagcaattctcctgcctcagcctcccgagtagctgggattacaggcgtgcgccaccatgcctggctaatttttgtatttttagtagagacagggtttcaccatgttggccaggctggtctcgaatgcctgacctcaggaaatctgcccgccttagcctcccaaagtgctgggattacaggcgtgagccaccgcgcccggccaacttcctactctgttttatcttcctagtctgttttatcttccttctctgaatttgggagttcccaacatgacatgtatttgtttgctttatctctctcattagaatatcagagctctgagggcagggatttggtgtgtattgtttactcccatatcctcagtgcttagatcagtgcctggcacacagcaggtgctccctaaatgtttgttaaatggctgaacaaataaatatgtgcctaccgtgtatcaggcacttctctccccaagtgactcagctgagattattttactaaatactccaatagtactatgacttaggcactaccatcgcctccatgtaacagctgaggaaacggaggtacagggatgtgtggtgcatgggtaaaaagtggcagggccgggatgtaaaccagcgtctgatttcagaattcaagttacgtgatgtcagatcctggcttcatcttagacttcttcatatcagactctggattcttgttgataaaatttgggactaccaattcaggttctctttctcctcccatcataaccctcccagcttagccttctccaaactgcatgactctctttgtactccgtggcctgggatctccatccctgggccccaggatgaaagggcctcacctgcttttgagatccactccatgtacccattgagctcacgttcaatctgttgttgccgcctcagcttcagaaaagcccgccggttctccacccgttccctttctttggcaaactccctggagaagcatagaaaagccagagtatggctgttttgaaaatgttaggaaacgtttgtgtgtgtgtttgtgtgtgtgtgtgtgtgtgtgtgtgtgtgtttgtgtgtgtgtgtgtgtttggggattcagaagtccctggaggtcaggagttttcaacaggaggagtcaggacttctgggaaaagactgggatattatagtgatgggtgcttctgccagcttcacacatttcccgacaactgtgcctaggtaaagaaaaaggccaggcacagtggctcatgtctgtaatcccagcactttgtgaggctgagatgggagtatcatttaaggccaggaatttgagaccagcctggacaacacagtgggccccatctctatgaaaaataaaaaatgtagctgggcatggtggcatacacttgttgccttagctactcaggaggctgaggcaggaggatcgcttgtgcctaggagttctaggttacagtgagctatgatcgccccctacactccagtctgggtaataaagctagacaccgtctcaaaaaaaaacaataaaaaagaaaaaaaccgaaaggataaaaccatgccatgccaaccaccactggctgcatacctcattctcattctcttcatacttttggctaataattatttcagccctcttttaagttagaccaataagccatgaatgaaagatttctgcagcaggttggcttctctgccataggtcccacctcttcctgtttcccttcttccttttcctgtttggaacatgaagtggccatccggagggcgtgaggcagccatcttaagaccatgaggtatccacgagattggaagcctctggtaaagatgtcagaatggaaagctggaagaatctggggttgctgatggtgccatagagccaccatacaagtgcccagacttcttatggtaagaaaaatgaagcccatttatgattaagccaaaaaaatcttggggatagaggacaatatgggtcaggaaaatacaccgttagagcatatgctatgattttatatttggaaaatgggggagaagtaaacccaaactattggtttttaaaaaaaatgtaaagaaagtaaagcccatatgaaccctctcactgggtacccctagcagtacacaacctctgcacctgtgcatggcttgctaataacagtctggtaacccaaacaagggaagaagccttttctctgtctagtgaatgaaaacaaagcttcaatggcctctacttggaaagaagttagcaaagaggagtgagtgggatggggtggggagtagcagaaacttaccctgacagcacacccagcacaaggttcagcataaaaaaggagccgatgatgatgagggggatgaagtacaaccagttccaagtgttccctgaggcatcgttgctctgtagggtgtgaggagggaaagcaggtgagagttgactgggactcagatagaacctgacaggtgagggaaggggaagctcggttctcttgtggctctgtcttaaatgttcttggcttgtggagttctggggctctggcatcccagagggggaaatggaggaacgttttctgaagaaaacatccaaagggtaaagctctctcttaattatgttctcctcacataacataattgacctgggaatggagtaagaaacacaagaggacttcccagaccacagtccagaaggagaaggaaaaagtaaaccaaacaaaacacaaaacctattgaaatggattaattaatccctggttccttctcttctcccaacacagtcatagactccccttagaggagatgcatgaccacagagtctgatggcctggtgaaatcaccaagccagacagatggtccatgagccctttcctcaagtgtctccctgctccattccctgcagccttaatgccaatcacaaaaaattctcagaagtttcagctcaattttcaagaggaaaaaagtccacaaatagaatactctctgaaacagaaaatagaacactatagcaagaaggaagtaagatgaggggaagaaaatcaaggagaggaggttggggggtggagagagaaagagagacagagagagagagggagagagagagagagagagagagagagagagagagagagagagagaaaagaatgataaaagccagcacttacagagtatttatggtgtgctggcaccttcctaagcacattatgtatgttagctcacttagtcatttaatcctcatgatgcctctatgttataatgcccatgttactattgaggaaactgaggcttagaaagacaaaatcatcagcccaagatcacagagttattcactagtggacatgggatttgcactaaccacctggccccagagtccatgggcttaacctctgtgctgggaagccttgcctccagctgtcagggcaggggtagcctttgaatagttgatcaccctgtgacacctgcagaatgcagggctctcaagtgtggctttaaaagcccacctttaaaagcatgtatgacactgctgctgcctggaagaaaggctaaaatgagaaagaagttaagatgaggtcattactaccaggtgtctgtgaagctgtggagcaactggaaccctcataatctgccaatgggagggcaccatgctgtattcatctcctgtggctgctgtaacaaggaaccacaacctaggtggcttaaacaacaaagatttattgtcttacagttatagaggccaaaaatccaagctcaaggtgtcagaagggctggttccttctgagagctgtgagacagaatctgttttatgcctctctcctagcttctggcggtttgctggcaatctttgctgattcttggcttgtagaggcatcatcctgagctctgcctttgtttaaacatggcattcttcctgtgagtgtgcctgtctctgtgccaaaatctcccctttttatatggacaccatcgtattagattaggacccaccctaatgatctcatcttaactgctatggttggtgcaaaaataacggcagttttgccaatggcaaaacctttacatgtgcaatgaatctatttccaaataaggtcacattctgaggtactgggggttaggacttcaacatatgaattttggggtgagacaataaaacccataacacatggtacaactacttgaaaaattggttgagagtttctatgctaaaattaagtcatgcttaacaatgggcatacattctgaaaaatgtgtcactaggtcattttgttgtgcaaacatcatggagtgtacttacacaaacctagatggtatagcctactacacacctaggctgcatggtctcgcctattgctcctaggctacaaacccatacagcatgttattctatggaatactgtaggcaattgtaactctatagtgtatctaaaaatatctaaaaacaggccgggtgcggtggctcacgcctgcaatcccagcactttgggaggccgaggcgggcagatcatgaggtcaggagatcgaggccatcctggctaacatggtgaaaccccgtctctactaaaaatacaaaaaaaattagccgggcctggtgacgggcgcctgtagctacctgggaggctgaggcaggagaatggcgtgaacccagaaggcggagcttgcagtgagcggagatcacaccactgcactccagcctgggcaacagagcgagacttcgtctcaaaaaaaaaagaatctaaaaacagaaaagctatagtaaaaatactgtatgataatcactgttatgtattcggtccattatgggaccactgttacatatttgatctgttgttgaccaaaatgccattgtgcagtgtataactgtatgtacctttgccaacacccagtaattcttggatagttactgatccaagatcactacaattagatagtaattccgaaatagtaattctgaataattacacaacagaaagcacacacaagaacattcatagcaatggtattcatcatagctccaaattgcaaacaatccacactgttatcaataggagagagaggatacatgcaatgaacaatgccacaggtcacatgagatcttaaaaagttaacgtcaagcaaaagaagccagacttcatttatgcaaaatacaaaacaggctaaactggtgaatgatgctcaaagtcctggtaggggtacccttgcggggaggtagtgactaggaacaggatatgaggggggcttctggggctgagaagtttctgtttcctcatttgtgtgctggttacatggatgtgtttagtttgtgacaattaatcaagctcttcacttataatccgcggatttttctgtatgtttattctacttcaattcttaaaaagttgtttttttttgagacggagtcttactctgttgccgaggctggagtgcagtggcatgatctcagctcactgcaacctctgcctcccgggttcaagcaattctcttgcctcagcctcctgagtagttgggattacaggcgcccgccaccatgcctggctaatttttgtatttttagtagagatggggtttcaccatgttggtcaggctggtcttgaactcctcacctcctgatctgcctgccttggcctcccaaagtgctgtaattacaggcgtgagccactgagcccggcagaagtttttttttaatagtcaactttaccttaaaaagaaagaaaatgctgatacgtgctgcaacatgggtgaaccttgagggcattatgctatgtgaaataaaccagtcataaaagggaaaatcctgtatgattccatttataggaggtccctagagtcgtcagatttataaaaacagaaagtagcatggtgggtgccaagggctgggggagggggaacagggagttcgcgtttagtggggacagagttacatttggaagatggaaaagtttgggagatggatggtggtgacagttgcacaacaatgtgaatgtattatacttaatttcacgaaactgtatccttaaaaatggttaggatgacaacaatatattaatggtttcaaatagctagaaggaggagcttgaatgttcctaacagaaagaaacaataaaggtctgagaagatggatatgctaattaccctgatctgagcactacgcattatatgcattgaaacgtcactatgtaccccatgaataagtacaattacttgtcaattaaaaaatgttacaaagttaaaaaaaatattaggatggtaaattttatgtcatgtgtgttttgccatggattaaaaaaaaaaaaaagcactgaaaataaaactaacaaagtcagctttaatcatggacacagacaggttctggggacaatgaatgtgccagccaccagcccacatccttgttttaacgagctcagaaatgccaatgctttgcttctggaaggttctggaagaaagaaccgagtcagcggaacattgctggacagaaggcagcactggctttgtgctcctctctccatcactttggcggctgagggttctcgttcccatttctcagggctaaatatagcccagggaacgaaactctgcaccggccgccagtagggagactctgagccatcacgaggagcaggctcagatgacagggacagggtggaggatgggggagagggacaggactgaaagggaaaaacagccgaggcccttccataccaaggcagcccgtccatctcaggtgctgccaacaagacccgaatctgcccttgcctgggtcctcgacaagcttgggaacctctggccacaggacatgctacccagcaccacaacagacacacgtggaggcttggactgtttgagctcatttaatcctctcatgaaccccaggagtgggtatataattatccccatcctcccgggtgagaaagctgaggcacagagaggtctattttttttttttttttttttgagatggagtctcactctgtcacccaggctggagtgcaatggcactatcttggctcactgcaacctctacatcctgggttcaagcaattctcctgcctcaccctcccaagtagttgggattacaggtgcttgctaccatgcccagctaatttttctatttttagtagaggcggggtttgaccatgttggccaggctggtctcgaactcccgacctcaggcgatccactcacctcggcctcccaaagtgctgggattacaggtgtgagccatcacgcctggccgagaggtcaagttacatgcccacagttctgttgtgggttgcagtgggtctctccaaaaagatgcattgaagaagtcctaatccctggtacctatgaattggaaatagggtctttgcagatggaatcaagttaagatcaggtcattagggtggaacctcatcctaaatgacgggtttccttataaaaagaggacatctgggcagagcacagtggctcacatctgcagtcccagctactcaggaggctgaggtaggaggattgcttgaggccaggagtttgaggctgtagtgagctatgatcgcaccactgcactccagcctgggagacagagcaagaccctgtgtctaaaataaagaaacaaacaaacaaataagtaaataataagaaaaggagaaacctgggcacagagacaaccttgcacagagggagaaggccatgtgaaatggagatgaaggcgggatcagggtgatacgtctacaagacaaggaccaccaagcactgttggcaaaccaccagaagctaggagggaggcaagaagggatttcagaccaagtctcaggaggcaccatggcccagctgacatcttgatggtctgtggcccagctgaccttgatggtctgtggactcctggcctcctgaactgcgagagaataaataaatttctgttgttttcagctactctatttgtggttctttgtggttcaagctacaggaaataaatgaagttactcagttactgaatggcagagggggcctccaaccctcccatctccttgcttttatctcctccccttttccctcgctcattcggttccagccacctggcttccttgcagtttctcaaccacgccaagcacagtcctacctcggcccttgcacaggctgtccctccctgcctggaatgctctttcctgagattgctacatggtttcccctcacctccttcaggttttttactcaaatgccaccttctgagggaggcctcccctgatggccctttacaattgcacccctcatttctggtccccattgtttcttttttcccatttgcatttcaccgcctatatactttacttatttctcttgttctctcgtcttcctggctggaatgtccattcgacaagagggaggggctttgtcctttttgttccctgctgtattcctgtattcccagccccctaggacaacatctggcacacagtcggtgctcaataagtggtgtctgttgaatgactgattgagaggtgtgtccaagttccctgcatagctcagatcgtcaaccccaagccaagctccctcctgaactctcatctgcaccatcctctctggggagtgggcttctgctgcctgattttagagacactttttctcttccaaactcatccaattattcaattccatactctggaatcaacaattcccagggaagaaggtggtggaaggctgggtgcagttttggattaggagatgagctttccctggtttgggggtgggggtgggtggatttcgttcaggagcaaaatgaaaagtacattttacaagcacaaggactggagatgccatggctgttctgtggtagttcatcagcaaagatggggtcacagatctcttctcctggttctcatctcttctttggcagttcaagttaagggagggatatgcacaagtctgaattcgggaaggagagtgggggaggatggcttgctcatttgttaaattcattaatattgggaaggatgtgctctagagatcgccttgtctttcttccaagggctcaaagacttccactgcctggaacactgttccccattaatgctgccatcaaatatttccagcaatatggtgggatggtccttcctgagtccctttggggttggctgaggaccacatgctaagtgctggccaatgaggagtgagtggaaatagctgtcattttggagccagagcattgaactttcagtgtgggaccttctagcattccttttttccttctggaatagcaagtggcaatgttctaggtgattagctaggtctcaagtgactgcactgaacagagcccccttcttccccactgccaacctgcactggacatgtagcatgagcaggaaatacatctgttgtcaaaagtcatggaggctttggggatgtttgttactgcagcataacttggctgccctgaccaatacatctttttaattaaatttttatattttgtagagagggggtctctgttgcccaggctggtctcgaactcctgggctcaagtgatcctcctgcttcagcctcccaaagtgctgggatttcaggcatgagccaccacgcccagccagattgatacagtttgatatctctgtagcttgctccttcacctctttctggtctttctttcttttttttctttctttttttttttgagatggggtcttgctctgttgcccaggctggagtgcaatggtgtgatctcagctcactgcaacctccacctcctgggtccaagtgattctctgcctcagcctccagagtagctgggattacaggtgcccgccaccacacctagctaatttttgtattttttaaaatagagacaagatttcaccttgttggtcaggctggtcttgaactcctgacctcaggtgatccacccacttcagcctcccaaagtgctgggattacaggcatgagccactgcacccagcctccttctggtctttcttaaatgccaacttctgattgactcttttatggatcccatgaggcaggtgagaaagtgtctgtctcttgcatgtctgatggagaacatacattcttctcatcagcacatggacattctccaagacagaccacatgttaggccacaaaacaactctcaacaaattttaaaatactggaattctgtcaagcatcttctcagactaccgtgggataaaactagaaatcaataccaagaagaatttcagaaatgatgcaaatatatggatattacgcaacatgctcctgaacaaccattgggtcaatgcagaaattaagatggagacttaaaaaattttggaaatgaatgaaaatagagacacaacacaccaacacctgtgagatgcagcagaagcagtgctgagggaagtttacacttgaccttagctaaagggccaagaagcaactaagagggaagtttatagcatcaaatacctacatcacaaaaaacagaggccagatgtggtggctcacgcctctcatcccagcactttggggggctaaggcaggaggatcgcttgagctaggggtttgagaccagcctgggcaacacagtgagaccccatctctaaaaaataaaaataaaaaaattagctgggtgtggtgctgtgcaccagtagtcccagctactggggatgctgaagtgggaggttcacttgagcctaggaggcagaggttgcagtgagtcaagatcatgctgctgtactccagcctgggcaccacagtgagactctgtctcaaaaaagcaaaaaaaaaaaaaaaaaattacaaattaagaacccaacacgtacctcaaggagccagaaaagcaagaacaaaccaaacccaaagttagcagaagaaaagaaaggtcaagttcaagatcacaatcagccaattatttccattctctgaacctatgcctggagcaactctgcctttaggtcttggcttggccaatttcttcttatcactcaaccttagatccattgtgcccccatcagagaagccttcttggacctctcaatcaaaaggacttgccccttcctgcagctcagccagacatctcattctcttcccagcacgttccactgtctgaatcatcttgtcaacttatgcatttcaagattgtcatcttgatcatcagctcctccagggtagagatttttcctgtctaaatcccagtgtccagatcagcaccagggacatagtaggtgctcactaagcattagttgcatagtcaatacaaatgttcctggggttcctgttggtggatcatttattttatttatttatttatttatttatttatttatttagggacagaatctcactctgtcgcccagactggagtgtgatggcacgatctaggctcactgcaacctctgcctcccaggttcaagtgattcttgtgcctcggcctcccaagtagctgggattacaggcacgcaccaccacgctcagctaatttttttgtatttttttagtaaagatggggtttcgccatgttggccaggctggtcttgaactcctgggctcaagcaatccgccctcctcagcctcccaaagagttgggattacaggggtgagccaccatgcccagcttggtggatcatttaaataataaacacaggaaatgtgtttatcccaaatccaaatgattaagctatttttctgggaaaggagaggcagaaggcagaattatggtcgcattagccaagtctttttgggctgatgaaatactccccacatcttcctcgattcccgccatctctgtgcctggtggatggagaaactgaagctgagagaggcaacatgatgtgcctggatcacacagggtgcagatggcatgggtgggactagacccgtcattctggcctttacaaccaactgattttttcccacttcaccccttctccgtacttgcatagtattttaagtaaataacaatgggcccaagagagcttcaagggtgagggatgttactgattcatcccagtatcgctggtggtgcctggtgcttagaaagcgctccataaatactcatcaaacaaactaatggctgagtcccagcaaaatccttcagtgccttctgttttatggtttattttcctctaatttttttgagcatggttcattgagaaaaagtatacaggatgttaaaaaaacaaaaacaaaacaaaacaaaaggaaaaaaccccaaaactcagctcaggagaacacccgtttctccagtatatgggataaacatgggggtggatttgagtgtgaaaaagctgaagtctgacagtgaccgtgagagaggctgtgtgtcccactttatacccgttatagatcatgccaggcctgctaattattttttcagtgctctttttcccctttcactctcaaaactgtcctggtttggatcataaattatataggctgtctgttcacgaagtctttttttttttttttttttttttgagacagagtctcgctctgtcacctaggctggagtgcagtggggtgatctcaactcactgcaacctccatctcctgggttcaagcgattctcgagtctcagtctcccaagtagctgagagtacacgcgtgcatgaccacgcctggctaacttttttgtattttttagtagagacggggtttcgccatgttggccaggctggtctggaactcttgaccttgtgatccacccgccttggcctcccaaagtgctgggattacaggcgggagccaccatgcctggctgatccatgaagtattttatcatcttccttcatcagctccttccttcatcctcactcactccccactggacatctgggcagctacatgtcctcacaaatgccaggaacatcctgcctcaggacctttgcactggctgttccatctacctcggctgctgttccctgagatatctccatggctcccttcatctccttcatgtctttcaaaaagcctcaagcaattgctggcctcaaactatcctctcctgcctcagcctcccaaagtgctgggattacaagtgtgagccatcacacccagccagggacatacattaatgatcactaactaaacatagttttgttgctttattaattgacattcaccaagggagagaaggagagaaatgtttatttattaaggaaaatttttaattgattatatatatatatatatatatatatatatatatatatatatatatatatatttttttttttttttttttttttttttttttgagacagagtcttgctctgttgtccaggctggagtgcagtggcacgatctcggctaactgtaacctctgtctcctgggttcaagcaattcttgtgcctcagcctcccaagtagctgggactacaggcgcctgccaccatgcccagctaattttttgtattttagtagagacggggtttcaccatgtagcctagggtggtcttgcactcctgagctcaggcaatctgcctgccttggcctcccaatgtgctaggattacaggcatgagccaccgtgccaggctgatagatgtatatattttttggatacatgtgatactttaatgcattcatatgatttgttccttcaggtctgttttttttgtttttttgttttttttttttgagacagttcttgctctgtcatccgggctggagtgcagtggcatgatcggctcactgcagccccaacctcccaggctcaagcagtcctcccatctcagcctctcaagtagctgggcctacaggcatgctccaccatgtccagctaatttttaaatttttttttttgtagagatggggtctcactatgtgcctaggctggtcttaaactctagggctcaagggatcctcctgcctcagcctcccaaagtgttagaattatagatcataatggccacggtgcccggccattcggggtgtataagaagaactgcaacctctcatcttgacaatgcacaaactctctactgttttattctatcccggacctctcaccaccctctaacactatctctaaggcagtgatccacaaactacagcccgcgggccagccacctgtttttataggttaacgtttaattggcccacagccatgctcattcacttacgcgctttatctgtcgttactttcacgctacaggagcagattgagtcgttgcgatggagaccatctggcccacaaagcctaaactatttaatgtctgctgtctgccctttttatcccaactgatcactggctttccccaccaacacgtcaactcctctgtgtccagaagagtgtctgcatacagtaggcattcaatgatggttgttgaatgaaccagtgatttatagtccaaagtctaatgctttgattttggtcaagacaaacatctatgaatgaaaaagggcatgggtcaaaggtgattccaaacattagcaaccactggccaggggacacgcatttatttatttatttatttttaattattaggttttttttgagacagggtctggttctgtcacccaggctggagtgcaggggtgtaatcacagctcggtgcagcttcaaacccttgggctcaggcaatcctccttcctcagcctcccgagtagctgggactacaggtacacaccaccatgcccagctaattaattatttttcttttttaaagatggggtcttgctttttgaccaggctggttttgaactcccggtctcaagcaatcttcctgcctcagcttctcaaagggctgggattccaggcgtgagccaccacgcctggccagggacatgcatttatgatcacaaattaaacgcagtttttctgcttttctaattgacattcaccaaaggagagaaatagagaagaagagaaactcacagagaaaagcacaaagaagggtgaggagaagggagagaaggagaaggaggtggagaaagagaaggaagagagagagagaacacaagaataaaagagacaaaggctgggcatggtggctcatgcctgtaataccagcactttgggaggccaaggcaggcagatcacttgaggtcaggagctcgagaccagcccggccaacatgttgaaacccagtctctgttaaaaatacaaaaaattggcaggcacagtggctcacgcctgtaatcccggcactttgggaggccaaggcgggcgaatcatgagctcaggagatcgagaccatcctggccaacatggtgaaaccccgtctttactaaaatacaaaaaattagctgggcgtgttggtgcatgcctgtagtcccagctactcaggaggctgaggcaggggaatcacttgaacctgggagtcagaggctgcagtgagccgagatcacgccactgtactccagcctggcgacagagcaagactccatctcaaaacaaaacaaaaccccccaaaattagctgggtgtggtggcacgcacctgtaatcccagctacttgggaggttgaggcacaagaatcgcttgaacccaggagatggaggttgtagtgagccgagattgcgccactgcactctagcctgggtgacagagtgagacgctgtctcaaaaaaaaaaaaaaaaaaaaagagagacaaagagagagagggaaaaagaaagagtcagagagagacggatgaagggtgatgaattgtgtccagagctgtgtgtgaaccctggctttgtcactcttggctaggggaccttggcaggtcacgtcaccctgtgggcctccgtttcctcatctggaagatggggttaaaaatatctttcctcacagggctgttttacggatcaagacacaatgtaaagctgatgccaggcacacagaagccctcggctaaaggcagccccaaattaactcaagacaccctggtcctgccaggtccccagcccctccacatcccctccttgggggcaaccaagagagggtaggtcctgtaccccatgaagtgaccccaatttgccttggcccagctggcaaagagggggtcagggaccttcccctgtgagagtggagacaatttctggcttttctgagccacatggggcacatagggtgagggggtccctgtgaaatgaggccacctgtcactagaacaacacagagccaccagctcttgtctccagcaaacagttttgttgcagtactcatggggttccccattctatccccttgagctcagagaagcagccctcaatcctatttgctgtgggaggctataaatggcagaatctgaggatgttgacactgagtgagacagagctgaattctgactctcaatcgctgtgcacagctctgggactcagtttcttcatctgtaaaatggggatattaaaggccctagctcagagagttttatatttttaccatcaaggaatcccaggctgatgcctagggaagtagccaaaacagggtggcacagaggaagtggctgatcacccatcttgattccacaaggctacccagagccttctctggcccaggaaggtccagggaagaggcccgtctagtgggcatgggagccatgtggataccttggagcttccaggtcaagaacagagatgggctatgttgatggaggtttgttttgtagcagttagaagtgagttggacctcacttttggcacagaatttccagtaaacctgcatttgtagtccttgggtatggacagaaactcacgccatcccaaagctcttagggggtaggttcatcttgaggcccagccagtaccccaatcctccttcctctgagaggcctggcctcctagagcagagcctctcaacctcagtactactgacattttgggctgggtaactggttgtgatgggggctgagccagacacggatggtgagaactccagttacctgctaaactatcacctcttctgaggggttttctagccacagtgactgcggaaggcactggcaagattctctcagtttcaccttggggaggaaacacttaggggtctgtggacagaattcaaggagttcgtgaatttagatagaaaataattacccctttacttcctcttactttcactggaagtggaacattttcttccatgatgattggaggtggcaaaccgcagaatcagtgacccccattaccaacagaaatcacatatagttcacagatatcatgcaaagtcttttaagcttaatactcccatgaaatcccaagacttatccaacccatcgctgggacttgttgttgatgtgttatgaagaatcacatctcttaaacgacatcacaactccttaaaaaaaaattctgggctggtcacagtggctcatgcctataatcccagtgactctggaggctggggtgggaggatcactagaggccagtagctcgaggacagcgtgggcaatgtgtgagaacatgtctctaccaaaaaaatacaattagctgggcatgatggtatgtgcttacagccctagctattcaggaggttgaggtgggaggatcgcttgagaccaggagtttgagctgcagtgagctatgattgcatcatcgcactccagcttagaagacagagcaaaaccccaaaaaactgggattaggagtttttgggaagaacgctatataggcataaaatcaagggttacataatatccacatccctgggggatactaatcttcatcatttggttaaagtggtatctatctgttcctccgctataaaacttctattttcccctttacctactctattcttcggaaatgagtcactaaatccagcccactctcaaagtaggggagattagtctccacctcctggggcagtggggagtgaagtttacatactttaaatggaattcttttgtaagaaagatttgcctgtttttcatttatcttgtgtatttaataataaaataaaaatgatcatttatttacttatgtgtttatttaagagatggggtcttgctgttgcccaggctggagtgcagtggcgggatcatagctcactgcagccttgaactgctgggctcaagcaatcctcctgcctcagcctcccaagtagctggaactacagacatggaccaccacacccggctaattaaaaaacattttttttgagatgtagttttgctcttgttgcccaggctggagtgtaatggcgtgatctcagctcactgcaacctctgtttcccaggttcatatgattcttctgcctcagcctcctgcgtagctgggactacaggcgtgtgccaccacgcctggctaatttttgtatttttagtagagacggggtttcaccctgttggccaggctggtctcgaattcctgacctcgtgatccacccgcctcggcctcccaaagtgctgggattacaggcgtgagccaccgcatctggctaattaaaaaaaaaaatttttttaagatgagtcttgctgtgtttcccaggctggtcttgaactccttgtctcaaacaatcctcccacctcagcttcctaagtagctgggattacagatgtgagccaccaaggctggccatttattattgatgtatcaatcaatcaatcaatgatttattttagtgtgactctctcgacagattatgtaagataaggacacctaggacactgtttgcctaagaaaggttcattctcctccctttctccctgcctcctggtctaggaatgacccgagaccttcttctttctccccgctaaccatttagcaagacaagtttaattggctcaagccaatttgggaggctgaggttggtggatcacttgaacttacgagttcgagaccagcctggccaacatgatgaaaccccatttttactaaaaatacaaaaaattagctgaccatgctggtgcatgcctatagtcccagctacttgggaggaagaggtaggagaattgcttgaaccccagaggtgagccaagtgagccaagatcgcaccactgcactccagcctgggcaacagagtgagactccatctcaaaaaaaaaaaaaaaaagtaaactgtgatcatcatagagaaatttgaagatacaaagaagtattgagaatatcaagattcccaaatcccaccacccgaaggtcagcttggtacagtgtcctccagtttttctttacttatattttcatatttgtacctttgagatcataaggtttacctccccttgattcctttttaaaaactcattttcccctcttatcatttcttcttttctagacagggtgagctgccactgttctccatgctgggaatgctgtttccaaaacatctgcctggcttcctccttctctgctcaaacatcacctcctcttaggaaccctccctgattggctgacctagactagggaaccatgcatcacttcttctctcgtgcagctttcgctctgttgcccaggctggagtgcagtggcatgatcacagctcactgcaacctccacctcctgggctcaatcgattttcctgcctcagcctcccaagtagctgggattacaggcgcccgccaccatgcctggctaatttttgtatttttagtagagatgaggtttcgccatgttggccaggctggtctcaaactcctgacctcaggtgatctgcctgccttggcctcccaaagtgctgggattataggtgtgagccaccatgcctggcctccttgatccctgtttaaaaacttgtttctcccactcatcattttttttgttttgttttttgacagggtttcactctgttgcccaggctggagtgcagtggcgtgatcacggcttattgccacctctgactccagggctcaagtgatcctatcctcctgtctcagcctcctgagtagctgggactacagatgtacgccactatgcctggctgatttttgtatttttgtttttttttttttgtagagattgggtttcactgtgttgcccaggctggcctcaaactcttgggctcaagtgatccacccatctcagactcccaaattgctggaattacaggcatgaaccactgcgcccagcacccccactcatcattatatggtgagcctttcccctgtatccttaatattctcccagcagacgatttttaatgatgacataatatgccatcatacggaaggaccatacggtatttaactgatctcctattgtcaggctttcaattgcttccagttttgttctaattttgtaaataactctgggatgcatatcctgatataaaccttcaacagcatcgctgattagttgagcttagatttcttcaaaaggcatttaaaccaggaagccaagggagaaaaacaagaaacgaatacaaaatctggaagggaatcaaacacatcctgtaggtgagctgccactgttctccatgctgagaatgctgtttccaaaacatctgcctggctccctccttctctgctcaaacatcacctcctctgagaagccctccctgattgcctgacctagactaaggaaccacccatcacttgttctcttgtgtagctttcgttcctattgggcttcccatagtacatacacatttgcttagtgtctcctgctttctgggtgattgattatttatcatgtttaccatttgcatctgtctctcctaccagggtggagattttagtctgtcttcttcgttgcagtgtctccaatcacctaatcattgcctggcacacagtaggtgctcaataaatgattactggataactgaaaggatgttaagagaataaatgtggtgccaggatcttacaaagggctgcctacccaggtgggaagcctctgcggtacacctgtgtccatggattccaagatgcttggagcgactgtctggactctccgttgatctcaactactagcttgttcagagctgggtaaatggagttggctggcaaggccacacccactggcttcggctccagcaccagtcatggaggacaaagatttccagacactctgcttgcctatggccaaacagatcgaggctcattctaggatagacccagggcagggctagcccaagggagatggctgggcacgaaggcagaacccaagagtgctccaacgtagcagctgtgtcctcctcagcagaaactcaaagatgggcaccttagcccctgcaccctggcattgacagacgctactcgttgttttaggggtagagagaggggttatctcactttgggaagccccagacaagagttcacatgcaagtcgttttatttaggaggagttataaatggaattacgtcctcctgctacacacacaaaaatgtttaagtcctaaccccctggtacctcagaatgtgatcttatttggaaatagggtaattgcagacgtaattagttaaaattaggttggactggagtagggtaggttctgatccaatacaactgatgtccttctaagaagaggagaacacacacagacacacgaagggaggatgcttttctttttctttttttttttttttttttttttgagacggagtctcattctgtcacccaggctggagtgcagtggcatgatcttggctcactgcaacctccatctcccgggttcaagtgattctcctgcctcagcctcccaagtggctgggattacaggcacccgcccaccacgcctggctaatttttgtatctttagtagagatggggtttcaccatgttggccaggctggtctcaaactcctgacctcaagtgatctgcctgcctcggcctcccaaagtgctgggattacaggcgtgagccactgtgcccgggctgggaggatgctattagatgacagaagactggaatggagaatgaaggctctagaagccaaggaatcccaaagattgtgggaaaccagcaaaagccaggaagaagcaaagaaggatcctcccccggaggcttttgaggggcgtgttgtcagctctgctaacatcttggggttggacttctggcttccagaactgtcagaccataaattcctgttgttttaagctactcagtctgtggtgcttcattatagcagccccaggaaataaatctaaaagttcatcccaggaaataccagacagggaagggaaggtggcaagtgaagggtgtgtacgtgaccaggttaaccctgcgggcaaccagagcctgatcccactggagagatgcagggcagagcaaaacgcccgacagggagggagctggggtatttatccactgacttctccaggcactggatgggggctgctcctaggggttgtccatgcaggccaggtgatcacagcagccccagagagaggcagagagtgacagctgattgcagtataaggcatccccgtcctcaaggaaccttggtcttctgacccagggtttcctgacagaaaccttactgacatttgggcctggatcattctctatggtggggcagaggtgggggatgctgtgcattgtagaatgttgagtagcatccgtggcctttacccacttgatgccaatagcatcctccttcttcccatccagttgtgacaaccaaaaatgtctgcagccactgccaagtgtcccctgggggcagaaatcatccctgggcgagaagctgtgttctaggttcacattaaggccaaatcattgcatgggctgctaaccaaaggacgagggtgggatgtaaatgtgtggaaagtgctagaaagctactctgagttagtggttaatagcagggccagcgaggggaataaagtaagacctctcacacctcactccacttcctcaggcactgctggagctgttctaatgaaaaattcatgcacatttctaaaaggaacaccatgcagggtggggaatttgacttacacggaggtcaccccgggccaggatcagttctaaacacttcatgcgaatccaccttacttagtcctcgtgccttgtgaggtgggactatgcttctcttcgttttgcacatgtggaaatagtggcacagagaggccaagcaccttgccgaaggctgcacagcaaggaagtggaagagtcggaaggaacccagacaggctgacacctgagtctctgctcttaaccactcagtttgtgtccccagaggtggcttagctctaagcttagaggcttccaagggaaacacccattggacaatgatgtttataaccgagccctctggaaattcatgcttcctgtcccaccactgggcacgcccccagcatcttaatctgaacccccagacgctttctctggtcatccaaccctgtgacatatcccttttttatgctcacaatttttttcagctcccattccccactcccattctctccctgagttcccagccttctccatttcccagtctctttccctctcaggagggttcatttcctgctggaacctcctctcacaccagccttgcaaagtaaaaacctagaacccacaaaaattccccagtgagttttggccaattgggctgaccctttgtccaagctgtttgcaggtgacggccaagagagggcctgagctcggatctgctgcatgttcccagagatgctacactcagacgaggttttcatgcaaattagaacaccatgtcccttccccacatccttttttctgtcaataaattatcaggataacagtagaaatcgtatgttgtctatgatatgaatgacattcttgtgcagtgcgtgacaggcgcaactgttcatgtggctccttttgctgcctactcccaactaaaacgggcctttgttgatcaggattacaaggatgagtttttgcaaatctccctccacccacaagtggggaaattccttaacccatttatgccggaggttgcaatttttgtgtgtgtgaaaaatccgaccttagtgatgaccttgagcagcaggatgtaaataactcccacaggattagcattccaataatggaacactaggcataaatgggttgttaaggaacatacactaggaccaagaggaaagttcagcttctctatgtacaggaggaggaagccaggtattgctcccgggtcaggccaaccgctggcctaaacttcaatggtaatttcagcccttagggcaggtgaagaggagacctccactggtcaacagagctgtgtgtatggagcagccccagggtgctctatggggtcactacagttgtggcatccttgtgtttgatcctgaatccttggctctgccccactccagctgctgacaagtgacctgcctggggactgcttacctgcatagtaggtgagggaaggtgaactgtggtgaggacagagtggggtttaaaacttgcacacctaaatatctatcaaaattataaatgcatttaggctgggtgcagtggctcacacctgtaatcctagcactttgggaggctgaggcaggaggattgcttgaggccaggagtctgagagcagcctgggaaacatagtgagaccccatctctataaaattgttcttaaaaattagctaggtatggtggtgtgtgcctgtggtcccagctactcaggaggctggggtgggaggatcacctgagcccaggagtttaaggctgcagtgagctatgattacaccactgcgctccagcctggacgacagagggagaccttgtctccaaaaaaacaaaacaaaaatcttccccaaaaataaaattataaatgcatttagtctttgatcctgcaatcccacttctgggaatggagaccctccaaccccctagctatatctgcaaaagtatgaagaggtacgtgcaacatgctcctggcagagcagcatcatgttccatgtcagtggacaggaagccagtcaagcatttctcttaatggcaaacaaataaaactatgggcagccacacaatagaatgctatgcagctgtgcaaaagaataaagaaggccaggcgtggtggctcacgcctgtaatcccagcactttgggaggcagaggcgggaggattgcttgagcccaggagttccagacctgcctgggcaacacggaagaaccctgtctctacaaaaattagctgggcatactagtgtgcacccgtgaagagactgtccatgtcctgcagtggaaagatctctagaacgtgtggttatgagaaaacaaaaatcacagaattgaacagcatgtatagaatgctactccttgggataagaaagaggggggaggacatagattcgattatgcttataattataattgcataaataaacattggaaggatattctgaggaactaaaggggttgcatattgtgggaagaggaagtagcatgcaagtgggggcagggatacatctttccagaaacatccctaacatttttaagatctagggcaagagtacaaaagcagaccacatactacggggaaatattgaaaaggtaactaaataaaacatgctgtgtgcttctactttgcaaatataccttcctttacactttggaaggtcagggtggaatttagaatccggatatctgcactgggtcaaggtgtggggagagccagccctgtcctgtccctttctcttcttagtcatggctctgtcctgccagaggggctccacacatatgtgtgggcattccagcttgtacatccaagctctggccacatttgtgttaacagccacccctcggatgtccttggccctcagttgggttacgaacagatccatatgagaattgcacgcaagttcatggaatctggccatgggcagggaattccaggatcctggtaacttaaaacatggcctacaaagtggggcacaagctcttggtagacacatccccttggctccaggaacttctcatcccacggggagtggtatggctggagaaggactgggtgagcctcagggcagggacccctcgcctacgtccaaagatattactctatcttttatctgtgttggtttttggatcacataacctttccgtattcaaaaatctaaaattatatctaaacacttgcacaatgaaaaatgatgttgcatctgggggccctccagacttctatgccctatagttagagttctgctcatgagcccctgtaatcttcaaaagcctgagcctcaggccagcttcagtggggctgtgttgtccttgggctgcctttcccagctcagggtccctccattgcagccttggagtctcactggtcccaggaggccacctccctgagactctgattgtccacacacactgtcccagcatcacttacattgtagaggagatcagtccacccttccatggttatgcactggaaaacagtcagcactgcaaacaggatgttgtcgaactgagtgatcccgttgttgggcccttcccagtagggctgacatttggtcccattggggcaggtgcgggcgggctcttctgtcccacatggagccggagactcaccctgaatgtcatctacaaaagggaaggggagaaaagtcaggggaaggagcagggaaaaccagctctgagaaatagggaccagtgactctataatgctgttggaacgaataacttttgggacaaacgtgatcagtcttcaaagagatcaatgtttggctttgggggtctattattggttttctattgattaatttcttctctgagctttactacttttctctttatgttttccatgagttttttttttttttctattcttttcctaaacttttgagatggatggattaactgcctttaaggctataaattgcctttaagtgtggctttacctgcatctcaacattttgtcatgcattatcattattgttcaagtaaaatattttctaatttccattattatttcttctttgacctatgggtaatttagatgtatttgttttttaaaaaaacttattaggtgtctgtgtgtgtgtgtgtgtatatatatatatatatatatgaagacagaggggagaggaagacagggagagaacggggggagagagagagcgagagagaagtataaaacaatataatgattcaccatgtacctatcaccaatttagacacttacctatttacttctggcaaattttgtttcatctattcctctgtatcccctccaaacactttgccttgccactagaatttttttttttttttttttttgagacggagtctcattctgtcacccaggctggagtgcaatggcatgatctcacctcactacaatctccgactcccaggttcaagggattctcctgcctcaggctcccaagtagctgggattataggtggccaccaccacacctggataatctttgtatttttagtggagatggggtttcaccatgttggccaggctggtctcgaactcctgacctcaagtgatccgcccgcctcggcctccaaagtgctgggattacaggcgtgagccactgcacccagcctagaatatttttaaagcaaagctcagacatcatatcatttcatccataaatgagaggcatgtctgttaatctgcaaacacttttagagttctctttttgttactgatttccagcttaattgcattacggtcagaaaatatgttttgtatttgtatttttttcagctttttgacctctgttgagacaaactttatggtccataatatagtcagttttagtaaatgtgccgtgtgcatggtgtagctggtaagtgcagccttcttccgacatccattaggacaaatttgtcaagcgcattgtgttattctcctataagccttgctgatttttttcttcttgggatgtactgggctcagggagctgttctgggggtgagggacaccagtacacacagttcctacccttgcctaagggtaaggaacaggagctgagctttctccccaaatagcaggaggcaggctgtgaaaatgccacaaggagagagaaacgtgccaacagacaccccttttgctggaaaccaaagacagcttcctggggaggtggcagtcaggctgaacgctaaaggtcagtccaaatcttaaggtattgatggggtagggaggcaggaaagctcacatctgggagtgtcctcattttaccagcacagcgggtctgagaggaccttattctgtgagcgatgcttttgaaggttttcaaagacgaccgtggcattgtcggacaagaaaacaaacagctgagtgtgtgtaaactcaagcttcctactcaacaaaaatatctctcaatgtatgtgctacagacttcgcagcaccaattctctgctcccttgactgagcacacagcagagggaaataaaccaatgctgaatgaatgaatcttgttggcctttcaagctctggctgaatagaaactccaagtctagcctcgccatgaacttaagttgttggaaacgccttcctcacttatgctggacttggtacatgaactattatttgataaatacaggttggaaggcaaaaatcttttaaacataaggctcagggcagagaacaaaataaatccatgggttcctataataaatgagaactatcgtttagcatggcacctgtgcctggaatcttctctgtctccacgccatgtccaagtctggctcaattcccaccctccatgtagcctctttgtgtagcccagttaacacagccccagtccctccctccctcccttccttccttctttccttcctctctctctttttttttttttttttgagacagggtctcactttgtcacccaggctggagtgcgggcaccatcatagcttactgcagccttgcagcctccaattcctgggctcaagtgatccttcttcctcagcctcctgagtagctaggactataggcatgtaccaccactcatggctaatttttaaatttttttattttgagacaaaatctcactctgttgcccaagctggagtgcagtagcgtgatctcggctcactgtaacctctatgtcccaggttcaagtgattctcctgcctcagcctctcaagtatgtggtactacaggcacacgccaccatgcccggctaatttattttttttgtatttttagtagagacggggtttcactatgttggccaggctggtcttgaactcctgaccttttgatccgcctgcctcggcctcccaaagtgctgggattacaggcgtgagccactgcacccggccaatttttaaatttttattttagcagagacagggtctggctatgttgcctaggctggtctcaaactaacggcctcaagggatactcccacctcagcctctcaaagtgctgggattacaggtgtgagccactgcacctggcccctttcaggcatacaatagctactgaattttcatatttaggggggcgtgggtataatcacacattagccttcactgttaaaaatggctgcaaatgaggggtcttgtttcctctaactattttggaagctcttagaaagcaggaagccttccactttatctttgcttccttctaagcgattggcacggtgctgggcacacaggaactgggctcccgacactgaggaatgctactgaaaacgggtctatctttagcagctttgcaatccccctcaaccccccaaccaccgacacgaaacactctgagcgttgcttctagaaaaacaagcgtccagagtgtctgaggaattcggttataaatacattttaaaattaacccactgcctgggtgtctgtatatatctgtctcttactcacacgtcttatatttttaatcgtgagctagcttttcagtctttctcctaaatcgaggcttcctcccctctggtggcaccacccacatctgtcccctcaaaaccccactcggacccaagccaaccccatggcctcttctcctttagctagtctagggtagaaaaacataaaataaaacttcacagaaacctaggatccaggagtcctggtttctctgctcacggctgatttttccaagaggccctgccccatattcattctctctctctctctctctctctctcgcatttccgcctgggtgacgaggccaggagcagaaatagctctgcctcaattaacaccttcttcatcggggaaagaaataattaggacattccatattgagcaaacttcacaagcccaggagagaaagagacaggaggagcaagagaaaaagaggaaaaaaaaaaccaacaaaccaaaacccacaaaaaaacccaaacctccaaccattgcaaataaaccttccccagtgggttttccctccccgtggggaggagtggggagggagggctcaggggctgcctctgcggatccacttgggggtcactgggtggagagggtgggtggaaatccactcccagacagaatcttcttctgtggctgcctttcccaaataaggggcctgaaacctctttctctgcccacctgggttcccctttgggcttcttgattccttctatccactccttcaattcacagctcccttgacccaaatcatcagaaccagaactgctattcagtctgtctgcacccagatggccagtggtccaaatactgaaatactgaaggcatcccttcctacttgattccatttcattctggagctttagagagcaagcagctagagtttggatggcaaagatttaactgaaaacgtatccaagggctatttggttcctgagtgtggatcgtggtggacacactgcttccacactgctggttcagagctgagccctgggagagtgtctctgcgctgcctggcttttccggggctcaccctacccccagacccagccactgaagggttaatgtgggcatagtcagggaggggcagaatgctgctgagtgctaggttctgattggttggtgccaggactcccaattggggtatctctggtacatcctgggggttgggggagaccaggaggactcatccagtactctcacccagcactcagggcagagaacaaaataaatccatgggttcctataataaatgagaactatcgtttagcatggcacctgtgcctggaatcttctctgtctctcaccttccacaaggtaccactcacaatgcattgaggcaataacccttttctggcccaactctccccacttcttgcttgctttagaagtcaggactggtcgaggtctgaaagcacccagaatacctgttccactcagccagatgtgccaggcattaattcccactctaggagcagtcctcaccaatgtcaaaaagaagccagtgtataaataccccagctcccttgccccttggctgggacggctctgaggtgtgtgttctttttttatttatatttttatttatttatttatttgagatggagtctcactctttcgccaggctggagtgcagtggtgtgatcttggctcactgcaacttctgcctcccgggttcaagtgattctcctgcctcagcctcctgagtaattgggactacaggtgcctgccaccacacccagctaatttttgtattttttagtacagatggggtttcaccatgttggccaggatggtctctgactcctgatctcaggtgatccacccgccttggccccccaaagtgctgggattacaggcgtgagccaccgtgaccagctgagttgtgtgttctttgctgtctcccagaggtgcccagggggatccagtcccagttttaagtggtaacccgcttgatagcacactctttaaaagatcccttctttctctgctcacttcctcattcccccgatggtgcttcctgggatcattcccaaataaactctttctctgctgggtcaccttctgtggaaccccacccctttcaacagctaagatctcagaggctatttcactcactgcctctcctgtagtgctctctgaaggagacggtcctcccagctgccaggagaaagaagcacacccctgcctaatcctcccaagagcttgtccctgaaggagaaaactggaaagatgcatcatgctccgtggacctacctgtcccctcttcaaagcaggtggtatgaaattttcccatataaaattctaaccctatgattgcaaaaataaggattgcaaaaaataggaggaggccgatctgcagcaaagggatcatcgccttcatgatcgacttcaggacgacttgtaaacctggggggacacagagagaggccccataagcccatgagcaagtacccccaaaccccgccaccaagacgcccaggtctctcccagacaaagcaggtgtgttcctgagggaacattaagcacccaggagcctggggattgggcaatggtgaaggaagcaccacacggaggctgatccttatcatgggaacaacacttcctaggttttttttttcctttgagacagggttttgcactgctgcccaggctggagtgcagtggcacaatcacagctcactgcagcctcaacctcctgggctcaggtgatcctcctgcctcagtccctgcaatagctaggactacaggcatgcaccaccatgcctggctaagttttaaaacttgtttgtagagatggggtcttgctatgttgcccaggctggcctgaaacccctggtctccaaggactcaaactcctcagcctcctaaagtgctaggattataggtgtgagccaccatacctggcccctattattattattatttattttatttattttttttgagacagagtcttgttatatcgcccaggctggagtgcagtggtgccatctcggctcactgcaagctccgcctcccaggtttacgccattctcctgcctcagcctcccgagtaggcccagctaatttttcatatttttagtggagacagggtttcaccgtgttagccaggatggtctcgatctcctgacctcgtgatccacccgcctcggtcttccaaagttctgggattacagacgtgagtctccacgcctggccttattattttttaaaaagcacttttaactttaaagtatttatttatttatttattttaattagccaggcatgatggtgcatgcctgtagtcctagctactctagggactgaggcaggaggatcgttaaggctgcagtgagctatgattgtgccactgcgccccagcctgagtggcagagcaagacgctgtctcaaataaatctatatatatattttatagagacagggtctcactatgttatccaggctggtctcgaactcctgacctcaagcgatcttccagcctctgcctcccaaagttctgggattacaggcatgagccacagagcccagccaactttaaagtacttaataaaggtatttgacatgctgttccatttgatgatcttttgggcaagaaaggggtgggagtccattgcttttggagccatattcctgggtgttgggcaacttgcacccagaagagggagccattttcttaattttttttttctgccaagaggcggtgtcttttcctcattcataaaaggccgccatataggctagttgctgctctgggtaggaaagcggttggcggtcccaatttcaaccccaaggaaccagactcaacattatttcactggcttctagtgacaagcccctgaggtggccatacatgtaaagtcactctcattttacagaagtgggaagcaaggctaacagagatgctgtgattcacccagagaatgcatgagaaatggcagaactaggcagggcgcggcggcggttcacgcctctaatcccagcactttgggaagccgaggccagcggattaacgaggtcaggagttcaagacaagtctggccaacatggtgaaaccccatctctactaaaaatacaaaaaattatctgggcatggtggccagcgcctgtaatcccagctacttgggaggctgaggaaggagaattgcttgaacttgggaggcagaggttgcagtgagccaagatgacgccactgtactccagtctgggtgacagagcaagactctgtctcaaaaaaaaaaaaaaaaaaaaaaaaaggcagaactaggatttgaacccaggtccatctgaaatgaagccccatgtttgcccatgtgctgatgttgctttctctgttctgagcaacccaattcagaaagatggtggtgaataagaaggcagggggccaggtgtggtggctcacgcctgtaatcccagcactttgggaggccgaggcgggcagatcacgaggtcaggagatcgagaccatcctggctaatatggtgaaaccccgtctctactaaaaatacaaaaaaattagctgggcgtggtggcgggcacctgtagtcctggctactcgggaggctgaggcaggagaatggtgtgaacccgggaggtggagcttgcagtgagctgagatcacgccattgcactccagcctgggtgaaagtgcgagattccatctcaaaaagaaagaaggcagggaacagtccccgaagggacacagtggaacagaagacacacccaactgggcatctgaagacctaaatctgggggtattgtcatcaatcagggaccccatgcaagctcttatcctaccaagctcagcctccagtagcctctcatctaacaaatggttcattcatggcggctgaattactctgggcttcaaatccttttgggagaggaaggggttaatactgaaattcgcatcctgcactaaaagttccactgttgtaagactcgaagaatgttaataataataatagctggccaagcgtggtggctcacacctgtaatcccagcactttgggaggctgaggcgggtggatcacttgaactcaggagtttgagaccagcctgagcagcgtggtgaaaccctgtctctacaaaatacaaaaaaattaactgggcatggtgctgtgtgcctggagtcccagctatttgggaggctgagatggtaggattgcttgagtctggggaggttgaggctgtactgagctgtgattgcaccactgcactccagcctggcgacagagcaagagccttagttagtatttctctgcctatcattggcttttttttttttttgagatgggcttgctctgtcacccaggctggaatacagtggcatgatcacggctcactgcagccttgacctcctgggcacaagcgagcctcctgcctcagcctcccgagtaggtgggactacaggcacacttcaccatacctggttccactaccatttttttcttgaggctattaactcaggtctgaacgatgacaacatcctatgtttgtaaccactatggtatctactaggaaagtctatgatcaaaatgaaggttcaaacatatagcctgaggctttgcttcttgattgcaggaacttcccatggctcttgatgggtggagaccacagtaagagagggaagctgtcaggatagctcgaggggccatgccactccaagggcttaaaaatgtaatgtgggtgctggccgggcgcggtggctcacgcctgtaatcccagcactttgggaggccgaggcgggcggatcacgaggtcaggagatcgagaccatcctggctaacacggtgaaaccccgtctctactaaaaatacaaaaaattagccgggcgtggtagcgggcgcctgtagtcccagctactcgggaggctgaggcaggagaatggcgtgaacccgggaggcggagcttgcagtgagccgagatctcgccactgcactccagcctgggcgacagagcgagactccgtctcaaaaaaaaaaaaaaaaaaaaaaaatgtaatgtgggtgctaacagatgcagtgtggtgcagtggttaaggtgctggatactcttggtgtctggccaagatcccattttctttctggtgtacccgccctccagctgctatggatgttggttgctaatgcctcccagctgcctctcttcttagtagaattgcccttggtgatcaaaagctatctcacctgggagctactgcgtctctacctcccatccacagtgactgactatagaagtacaaaaggccggcatccttgccatgcattggaggacaactctggtgtcacacacactccagctgaaattgcgtccctgctctatccattccccagccccaccctgctgatctcctgctgtctctcccaagagccgtcccccaataaagcaggtgcatctgaacacccacctaagtatccgcttcaagggaacctgacctagtcatccacttactagtgaattccaaacctcagcttctccatctgtaaatggggactgcaatagtacctccctcatacgattagatgagagagttcacacacagtgaagtacctggtaagtcataggtggtcattaaacagagactcttgttactactgctattataatatacatatattttttgagacagggtcacactttgttgcccaggctggtgttgaactcctagcctcaggcaatcgtcctgccttggcctcccaaagtgctgggattacaggtgtgagccactgcacctggctcttttgactattagatttgggatggcccttaatttaatatgatgcaggcatctgctgggatcttgcagagaccttggatagaagtgtcttctttctacaaaaagatcctgctggtgatcctctgggaaatcttactctttaaacctgggtagcaatgaaccggaagaacgaagccaataaaatgtaaaatggtgataataaaagagactacttcacaggcttgttgggaggataaaggactttaaaaaaatggaaatacttagaataatgtctggcacatagtaagtgctttttaatttttttttttctttttttgagacggagtttcactctttcatccaggctggagtgcagtggcgtgatttcagctcactgcaacctccgccccccgggttcaagtgattctcctgcctcagcctcccgagtagctgggattatagatgcccgccaccacgcccggctaagttttgtatttttagtagagacggggtttccccattttggccaggcaggtctcgaactcctgacctcaggtgatccacccatccaccttggcctcccaaagtgctaggattataggcatgagccactgcacccagcctataaattgtttgtttttaaactttttgttgtctgtttttttgagacaaggtctcactctgttgtccaggctggagtgcagtggtgctatcacagctcactgcagccttgacctcctgggctcagatcctcctgcctcagccttttaagtagctgggactacaggtgtgcaccatcatgcctgctaatttttttttttttttgagacagggtttcgccatgttgcccaggctggtcttaaaactcctgagctcgctctatctgcccgcttcggtctcccaaagtgctgggattccaggtgtgagccactgtgcccagtcaacctggctaatttctaaaaaaaaaaaaaaaatttgtagatattggcgggggggtgggggtggtgttcctcacaatgttgcccaggctggtctcgaacttgtggcctcaagtgatcctcccaaagtgctggaattacaggcatgagccaccatgcctggctaaattattattattaaccaagacaagaagatagaaaaaggacagccctgttttatttttgctttttacatttttttttggctcaacctacacttaatcttgaccctgcatatggcagccacccttaaacggggactagatgtatctgtggagaatgagaaagcagcaaggaatgagtatgaattttagagctcattactgtccactctaagaattcaggtgagtaatttaacctccttaagcctcaaccgtctcatctgtaaaatgggtgttcgctgggtgactgtgaggatgaaataaggtaattcatgtaaagtccttctgtagtgccctgcacgcagcaggcactcattaaatgggaatggtcattgccaccagtggtacggcccaggcttggagtcacacttgctcactcctagttctgccacttctcagccacaaaaccctgctccaatgtttcagccactctgagcctcagtttccccctccataaaatagagacatcagtcctatcaacttcatagggctgtgagtactgaatgagatcacacgtggtgcttagcatggctcccgatagacagtaggtgctcaataaatgggtgtggctcctagtttgctttcaggagctcatggggagctacagtcatattcctagggggttccctatagggagtcccaaagaagagactgccctcacacaggctggtggcaggatgtggcctcctgagatgctctgcataggggaaactgagggctcctggggcccgtgagcaaaccccttgtcagggtcggaaactcacgcacttgggattccagacaccagcttgagcggccgcagcactcgaactgccctcagcgtccgtaggtcaaactccgtcccaactgtcgccaagatgctgaaagaaagaagccagaatggagaacagagggtgggttttgggggtcagacagcagggcgggggtgcttgggattccaagctgtcctgtattggttgggtgaccacaggcaggtgactcgacaccactggcctcagttttgtcacctgtaaaatggtcttaacagtacctgcctcacgggataaaaggtgatttacgaagacccccaacagatggttcatgttgcacaaatgttgcaatgagagaaatggaatcttccccatggctcaaggttggggtgacattcagtatatttcacaacctacaatgacaatagattgtggggtggcctggggccctgggggaatggcagacctttcggggtttgtggctctttattttattttattttatttttttgagacagagtctcactctgttgcccaggctggagtgcgatctccaatggtgtgatctcagctcactgcaacctctgcctcccgggttcaagggattctcctgcctcagcctcccgagtagctgggattactacgcacccgccatcatgcccgggtacttttttttgtatttttgtagagacagggtttcaccatgttggccaggctggtcttgaactcctgacctcaggtgatccacccgcctcggcctcccaaagtgctgggattacaggcgtgagccatggtgcctggcctggtttgtggctctttaacaaatggcaggaaagtagttcagtgttaagagcccagcctgcatgggttcagatcccagatctgccactttccagttgggtaaccttgggcaagggacatccctgctctgtgcctcagtttcccccttttgtataacctggataacaatagtatcaatacctccaagggttgtgaggattcagtaagttgacaaaaagtggtcagcacaatgccaggcacacaggttaccggtatgctaacctattcagaaataaataagaaaacaaaaaaatgggtgtgatcctgcttgtgtggaccagccagcatcagctggctagaaggcagctacagaccccaagcctctggtcaaaaagagtcccttttgtaaatgcaagttagtaaggatgatagcagtaggtgggatgaggcttccatagaaaccctccgagcaagaccctgtcatgagacctcatttgtaaaagtattgctgttgaaacacagggtcccacctggccctgtttcctgaacatgtccatttcagagctaagtgatgtacagtgcgtggtcaaggcacaatacaataaaagagactgtcatcagaacttcatataatggacaagaaatgctgaataccagagggtctgtggttaatggaaggttggtcacagcaaataacttggggatttttcagtttatttttattttagacatggggtcttgctctgatgcccaggctggaatgcagtggtgcaatcatagctcgctacagcattgaactcctgggctcaagcaatcctcctgccttagcctactgagtagctgggattacaggtgggaaccaccacatctggcttgatttttcagttttatccaggggcttgggtcttaacacttcagtctgtggccaactggtatctgtacctcttgccttagggctgtctccaaatctggggcaggcccagggaatgaactttaagggagcagccctcaaccaaagattgctgggagttggtggatcaataccgcagctccctcacccttcattctggatcacttaagaggtgagttccacgtgggctcccagtaggacggagctcagttgcctacaggacaactcacccttccttgccccacctcccctctccttctccaacccttctggggtcacctctcagatgaactacttgcacaaggattgccctaaattcttgtttcaggatctattctgggtcatcctaaactaacacaaagcaagttcccaactttttttctcaagattacccctagaggagagatgggcatattaggttgggctgaccttttccaccatccacaagtgggcgtctgagcgtatcctatgtgctgggtagagtgacatatgagactatccctgccccatggagctgatgcagaagagaagtggttaagaaaaacatgcacacaatgagtgaatctgttgcaggtgtgatgccttctcagctaggaagacaatggctttgaggggcacacagcaggtcgtgttaactagtccagggcctgggataccccctacttcaagtcaagttcccatagatgagggggagaaatctggccagtggggaaagaactttccaggctgagagtggccatgacagagagcttgggactgaaagagggcttggcaaattcaagaaatgacatggtgtcaccactgggatttggatggtgaggttcaagcagcaagtcatgaagccagagtaggcaggggccatgacatacaactttacaaaaaatgaatttatttatttttatttttggagacagggacttattctgtcacccaggcttgagtatagtggtgcaacaacagctcactgcagcctcaacctcctgggctcaagcgatcctcccacctctgcctcctaagcagctgggactacaggtgtacaacaacatattcagaaaattaaaaaattttttttgtagagatggggtcttgctatattgcccaggctggtctagaactcctggcctcaagtgatcctctcacctcagcctcccaaagtgctgggattataggtatgagctactgcacttggcccattcaacttttaatttgatttactttatttttctcttctcctcccagctttctggtactaatttgggttcctcaaattctgacttagagatcactattctcttcttgcaccttgttttcttctgtgctggcacataaaagctgtcagggcatgaacagcaaagaacaggcagtggttaagtccttagtatttcacttcacaaacatcaactgagcactaataacaagccaggccctatctctgtgtgggggagactgagagtaaacccaataaatataagcaggctttgttttgttttgttctagagatggagtctccctgtgttgcccaggctggcctccaactcctgggctcaagggatcctcttgccttggcctcccaaagtgctgggattatggacgtgagccaccacaccggccgaggaagacttcatttcattgtgctttgctttattgcaatttgtagatattgtgtttcttacaaattgaagatttgtggcaaccctgtgtcaaggaggtctatcagggccattttttttccaacagcgtgtgctcactttgcgtctctgtgtcacactctggtaattcttacggtatttcaaacttttacataattattacatctgttatggtggtctgtgatcagtgatctttgatgtgactatagtcattgtttgggggtgccacgaaccacatccatagaagatggcaaacttgatcgataaatattgtgtgtgttctgactgctctaccaactggccatttccccatctctcccgctttccttgggccttcctattccccgagacataacaatattgaaattaggtcagtgtataactgtacaatggcctttaagtgctcaagtgaaaagaagagttgcacgtctctcactttaaattaaaagctagaaatgattaaacacagtgaggaaggcgtgtcaaaagctgagatagggccagggatggtggctcatgcctgtaatccgagcattttgggaggctgaggtgagaggatggcttgagcctaggagtttgagactagcttgggcaaaatagggagaccctatctctacagaaaataaaaaaattagctgggtgtggtggtgcacacctgtggtctcagctacttaggaggctgaggtgggaggatcacttggtcccaggaagtcaaggctgcagtgagcggtgattgcaccactgcactccagcctgggcaacggagtgagaccctgtctcaaaaacaaaacaaacaaacaaacaaaaggccataagctagaggttagccaagttgtgaatgcaaaggaaaaattactgaaggaaattaaaagggctactctagtaaacacatgaatgataagaaagtaagacaggcttcttgctgacatggagaaagttttagtggtctggatagaagatcaaaccagccacaacattcccttaagccaaagcctaatccacagcaagcccacagcaagactgagagaggtggggaagtgcagaagaaaaatctgaagctagaagatcttggttcatgaggtttaaggaaagaaggtgtccccataatataaaagtgcaaggtgaagtgataagtgctgatggagaagctgcagtaagttatccagaagatctagctgagattattaatgaagctggcaacactgaataatagatttttaatgtagatgaaatgccctattggaagaagttgccatctaggactttcatagctagagaggagaagtcaatgcctggcttcaaagcttcaaaggacaggctgactctcttgttaggagctagtgctcctggtgactttaagttgaaaccaatgctcacttaccattcctaaagtcctaaggtcttaagaattatgctgaatctactctgcctgtgctctataaatggaacaatgaagactgaatgacagcccgtctgtttatagcatggataactgatattttaagcccactgttgagatctactcagaaaaaaatatatatataatatataacacataatatatgttatatataacatatgagatatataacacataatatatgttatatataacacactacacatatgttatatatgatacactacacataatatatgttatatatgatacactacacataatatatgttacatatgatacactacacataatatatgttatatatgatatatataacacaatatgttatatgtgacatatataacacataatatatgtgacatatatacacataatatatgttatgtgtgatatataacacatgttatatgtgatatataacacatatgttatatgtgatatatataacacatgatatatgttatatgtgatatataatttatattacatatatgttatatatataatttatattacatataacatgttatatatatatatgtattttagatgaagtcgcactcttgttgcccaggctggagtgcaatggcacgacctcagctcactgcaacctctgactcccaggttcaagcgattctcctgcctcagcctccagggtagctgggattacaggcacctgctaccatgcctggctaatttttttgtatttttagtagagttggggtttcaccatgttggccaggctggtcttgaactcccgacctcaggtgatccacacgcctcggcctcccaaagtggtgggattacaggtgcgagccactgtacccagccagaaaaaagatttctttcaaaatattactgctgacaatgcactggttatccaggacctctaatgggcatgtacaagaagatgaatgttgtttttatgacttctaacacaacatttttttttttttttgagacagagtctcactctgtcgctgcagtggtgtgatcttggctcactgcaacctctgtcttcaagagggttcaagcaattctcctgcctcagcctcccaagtggctgggattacagtcatacgccaccatgcccagctaatttttgtatttttagtagtgatggggtttcaccatattgaccaggctggtcttgaactcctgacctcaagttacccacctgcctcagcctcccaaagtgctgggattacaggtgtgagccaccatgcccagccacaacattcattctgtagcccatggatcaagaagtaattctctatttcaagtcttatgatttaagggatacatttcataaggctatagctgccatagataaattcctttgatgcatctgggcaaaggaaattgaaaactttctgaaaagcattcaccattctagataccattaggaacatttgtggctgttccagtggctcatgcctgtaatcccagcacttagggagatcaaggcaggaggatcacttgaggccaagagttcaagaccagtctgggcaacatagtgagacctcaactcaattaaaaataaaaaaacaatccacaacaaacaaacaacaaaaagaacatttgtgattcgtgggaacaggtcaaaatatcaacattaataggaattttgaggaagtcaattccgatcctcatggatgactttgaggagttcaagacttcactggaggaagacactgcagaagtgatggaactagcaagagaactagagttagaagtggagcctgaagatgtgactgaattgctgcagcctcatgatcaaacttcaatgcatgaggcgttacttgttatggaagagcaaagaaagtgatttcttgagatggattctactcctggtgaaaattctgtgaacactgttaaaatgacaacatgagatttagaatatgacataaacttagttgacaaagcagtggcagggtttgaaagaactgactccaattttgaaaaaagttctactgtgggtaaaattgctgtcaacaagcatctcatgctagagaaatctttcgtgaaaggaagagtcgatggatgcggaaaactttcttgtcttattttaagaaaatgtcacaggcaccccaatcttcagcaaccacccccacgatcagtcagcacccatcaacactgagccagtgacccttcaccagcaagatgaggactcactgaaggctcagatgattgttaacttttttagtaataaaacatttatttatttatttatttatttatttattttttgagacagagtctcagtctgtcacccaggctggagtgcagcagtgcaatctcggctcactgcaatctcccccccgcctcccaggttcaagcaattctcgtgcctcagcctcccgagtagctgggcttataggtgtgcaccaccacacccggctatttttttgtatttttcatagagacggggtttcaccatgttggctgggctggttttgaactcctgacctcaagtgatccacccaccttggcctcacaaactgttgggattacaggcatgagccactgtgcccagccttttttttttttttttttaatttttgttgagagatacggtctcactctgtcccccaggctagagtgcagtggtgtgatcacagctcactgcagtctcaatctctcaggctcaagtgagcctcccacctcagcctctcatgtagctgggaccacaggcatgcgtcaccatacccagctatttttaaaaagaatttttttgtagaaacggggtctcactttgttgcctggtttcaaatccctgggctcaagcaatcctcctgccttggcctcccaaagtgttgggattacaagccactgtgctcagccttgatggattttaaaattaaggtatgtacatttttttttagacataatgctatcatgcacttaacagactatagtgtaagcataacttttatgtgcactgggaaaccaaaaaaggcacgactccctttattgcaatattcgctttgttatggcgacctggaaccaaaccagcagtgtctctgaggtatacctgtatgacagatgttagggcgatgagtgcttaggagaaagttaccacagagcaaggggaaaggacgcgtcagtgacatggggctggcgggatgaagggagtggtgacatttctatcagtaaaggcacctgctctttaccacctggaaggcaaacagttcagtgttaaaagtgttacagggccgggcgcggtggctcacacctgtaatcccaacactttgggaggccaaggctggcggatcacaaggtcaggagttcgagaccagcctggccaatatggtgaaaacccgtctctactaaaaatacaaaaattagctgggcgtggtggcgggtgtctgtagtcccagctacttgggaggctaaggcaggagaatagcttgaacccgggtgacagaggatgcagtgagcagagatcgcgccactgcactccagcctggtgacagagcaagatgccgtctcaaaaaaaaaaaaaaaaaaaaaaagtgtttagaccagcactgcccaggagaaatctattaagagctacttatgaaattttatagccaggtgcggtggctcatgcctgtaatcccagcactttgggaggccaaggctggcggatcacaaggtcaggagttcgagaccagcctggccaatatggtgaaaacccgtctctactaaaaatacaaaaattagctgggcgtggtggcgggtgtctgtagtcccagctacttgggaggctaaggcaggagaatagcttgaacccgggtgacagaggatgcagtgagcagagatcgcgccactgcactccagcctggtgacagagcaagatgccgtctcaaaaaaaaaaaaaaaaaaaaaaagtgtttagaccagcactgcccaggagaaatctattaagagctacttatgaaattttatagccaggcgcggtggctcatgcctgtaatcccagcactttgggaggccgacgcaggcagatcacttgaggccaggagttcgagaccagcctggccaacatggcgaaactccatctctactaaaaatgcaaaaaattagctgggcgtggcggtgggcatctgtaatcccagctactcagaggcagaggcaggcgaactgcttgaacccatgaggtggaggttgcagtgagccaagatcacaccactgcactccagcctgggtgacagagcgtgactctgtctcaaaaaaaaaaaaaaaaaaaaaaaaaattaaaatttgctagtagccacattaaaaaagtaaaaagaaacaggtaaaattcatttattggtttgtttgtttgtttgtttatttatttatttatttatttatttatttatttatttattttgagacagggtctccctgttgtctaggctggagtgcagtggctcaatcttggctcactgcaacctccgcctcctgggctcaggtgatcttccttcctcagcctcctaagtagctgggactacaggtgggagccaccaagcccagctaatttttgtattttttttggagagacagggttttaccatattgcccaggctggtctcgaactcctgagctcaagcaatctgcctgctttggcctcccaaagtgctggtatttgaggcatgagccactatgcccagcctgaagcattctaagaagatcgtagacctgctgggcacaaaagctcctgcctgtaatctcagctactcgggaggctgaggcaggaggatcgcttgaggccaggagttccagaccagcctgagcaacatggcaagaccttgtcgctattaaaaaaaataataacaattaaaaaaatgggcggggcattgtggtgtgtgcctgtaatcccagctactcgggaggctgttggtgggaggaccacttgagtttgggattttgaggctgcagtgagctgtgatcgtgccactgcattccaggctggaagacagagcgagaccctgtatcttaagagataaaagatattttgcacatggttttccttggaatctggtcaatattctacactttcatgtgtttcaactgaagtgctcaaaggccacatgtggccagcggtgactgtatcaaacagcacaagtgcagagaaatagacatttgaataaagactgggagaaagcaagggaagcaagagagtgagccatatgaatatgtcagggaaaactctaggcaaatggaacagccggtgcaaaggtccagctggtgcaaaggtcctcctcccgctctccccctcactcactctgttccagccacaccaattcatccgtgttcttcaaatgcaccaggctggaccgtgcatttaatagctaggccatgcctggtgtatttgagaaacagagatgagttggtgtggctgaagcagagcgagcaagggggagggtgtgaggggacgaaggcagtgaggtgatggatggtgcagggctttgtgggttgtggagaggactttggctttttctctgagtaaggtgtgagccatggagggttctgaggggaggagggatgtaatctgacttgtattaaaatatgatctctctagggggcaaggccggaagctgggagattgaggaggaggcaactgcattgacgcagttgaacgctgataagcctggaccagggaggttgtgctggatgcagtgataacgctaagacaaactccaccctgctttagggagagaccacaccaatgagtgagtgagagattcaactacaagtccctctgaccccagggatagaggaggcagggatgaaagagggaatgattacagcctggggacagcattatcgcagagctcatgtccggggaggcagcatagcacagtcagaacatctcagacgggttaaatcctggccctgcattttctcattgtgtgacctttcccattgccttaacttgttcaagcctcggaaatgcagataatctcaccaccctgtgcaatcccagctggctcccaagatgcattacctcacagcctcctccctggaaggataagaaggaattaggaggagaacaggaagataagggaggcttctctggctaagaaagccctatggaggcagaaggctccactcagggtatgtggtaggggagaggttgggtaagctggacagtggaggctgtcaactagaggctgggtcttgtcctgtggacagtgagagtcatgtaaggttttggagcaggaagggatgtgattagggttggcgttcagaagacaagcctgacagctgaaaggacagattggtggtgatggagcagaagttaggagggagccgcaagagcaggctggtgtaatgagggctggaactaggacaaaggcagtgggagtacaaaagaggccccggtttatatatagctgccattgattgctgtgctccagggagcctgcctgggctcatcaaatcctccctgcatcccagcggttggcagtttgaggcccattttacagaggaggaaactaaagaccagataagttaatcccacatggaggttcctaccactgagtaagaactcgaaccccagaccagccacaggactccagaatcccagttctctactgtgtcatccttcaactcctgtgactagttgggcggggtgaggggcaacggtggtgaagaaagagaagaatggctctggttctgaaaggaccacggagtgatgttcattcatttattcaacaaggatttagtgagcacgtactatgtgccagatattcagagagtgcctaaagatgctaccaaggacaaagcaatagtgggaaaagatatagtatgtcagacggtgtgaagtgctatggagaacaatatggcagcccctagggcttccaatggaaagactgagtgtggagcaggagagaggtatcaagggtgactccagggttttggcctgagctaactgaaggatgaagttgctgtcaatggagatggggaagatggaggaagaaggtttcaaagatcaagaactgggttgtagacatgttgagtttgagatgccagttttccgtcactccttagttaaaatcttccaatggcttccatcaggcttggagtaaaatttaaagtctaccatgaccacatgaccttgcgtgatgtgactcctgctgaccaccttgtcccacaacaccctggccactccgacttcctttctgttctgccagcaggaaaagctcactttctgctttattgagaattactatattggctgtctcctctgccgtccccattccttcaactctcatcttttgcctagctggcctcttcgaattcttcaggttgaaactcagattctgccttctcagagagaacatccctcaacttcctagctaaagagatcctgcctcttcactctctggaattatattgtttgtttgtttgtttatttatttatttttaagacaggatctcactctgtcacccaggctggcgtgcagtgcacagtcacagctcactgcggacttgacctctcaggctcaagcaatccttccaccttgtcctcccaagtagctggaactacaggcatgcattaccctatccagctaatttttaatattttttttgtagagacagggtcccagtacgtttcccaaggtggtctcaaactcctggattcaagtgatcctctcatcttggtctcttagtgtttggatgataggcgtgagccaccatgcctggccgtactgtttattaagtcgtatttattattcatgctttcttctagaatgtcagctccacgaggacaggggctttttttgtatagcatctttcatggcctagtgagtactcaataaatattgtggtgggtgaataagtgaggtgtggcagaggacagggttatggaagaccagataacccagggtagatgagtgaagtggaaaaagccaagggtccccagtggagagggagaagacacagacatgggaggagactggtgtggagaatggcatacctgacagtcaagttcaaaagcattttgaggctgggtgcggtggctcatgcctgtaatctcagcactttgaaaggccgaggcaggtggatcccctgaggttaggagttcgagatcagcctggccaacatggcaaaactccgtctctaccaaaaatacaagaaaattagccagccgtggtggcgggagcctgtaatcccagctacttgggaggctgaggcaggagaatcgcttgaacctgggaggcagaggttgcagtaagctgagatcgcaccactgcactccagcctaggtgatgagagtgaaactccatctcaagaaaaccccccaaaaacaatagcaacaacaaaaacacacagaaataaagtattttgagaaaggagaggtcactggtctccagggccgcacagaggtgagtaagagtaaaggatgaagaatgcatttcatacggcatcagggtcacgtcagtcttgcgggggctgatggttgagggagaacaagaggagaagaactggaaatgtgagcctgggtaggagaggagattttcagggtgggagagaactgaatatgggtcaagggagagaagttgatgatgtatctcttggcctttagagagctgcaccgcccaataaagtaaccactagccacacatggctatttaaatacagatttaaattcatttaaattaaatgaaaaattcgcttgtaccagtcacgttttaagtgctcccaagccacatgtggctggtgcatacatacatacttcatcagtgcagaaagttccattggactttgatgttctagcatgtccatccccgtagggcagatattttctattctttctttctttttttttttttttttgagacagggtctcattctgttgcccaggctggagtgcagtggcacgatctcggcttattgcatcctccgcttcccaggttcaagcgattctcctgcctcagcctcccaagtagctgggattacaggcacttgccaccatgcctggctaatttttacatttttagtagagacggggtttcaccatgttggtcaggctgatctcaaactcctgaccttgcgattcacctgcctcggcctcccaaagtgctgggattacaggcgtgagccactgcgcccggccttcttttcttttttagagacagagtcctagtatgctgcccaggctggactcaaactcccagtctcatgagatcctactgccttggactcctgagtaggtggaactataggcctaagccactgtgcctggctttgcaaaatttatttttattttttattttattttttagaaattttcatctgttttgttcatagcatctccagcacctaaagctgtgcctggcatacagtaggcactcaataaatgtttactgaatgaataatgaagcaaaaatgtagaaaagtgtggttgataattaacagagtatattctagaagaggtggaaggctcagtatttaaagaagagagtccaggcgtggtggcttatgcctgtaatcccagcactttgggaggctgaggcaggaggattgtttgagctcaggagttcaagaccagcctgggcaacataaagagaccccatctctacaaaaaatataaaaattagccggccatggtggtacactcctccagctgctcgtgaggctaaggtgggcggatcacctgagcctggcaggtcgaggcagcagtgagctgtgattgtgccactgcatttctgcctgggcaacagagtgagaccttgtctcttaaaaaaaaaaaaaaaagaagaagaagaatggaagacacagttgtccatccaagagccaccaccactacccgccttactggcagagcccacctcccatcaaagaggcagaaaatgcctaatagtctctttttcccaagattccttgcaataagagcacttgtcacatgacccattcgtaggcctaacaggatctgggtgaaaaatctgctgggtgcttctggaaaaggattttttccccgtgagatgagtcacatggtaagagacagcccttcctctccctcttctttggccggatgcttttgtgtctgtctacgtggatggctgggtaagtaccttagaactgaggcagtcatcggccgggcacagtggctcacgcctgtaatcccagccctttgggaggccgaggcaggtgcatcacctgaggtcaggagtttgagaccagcctgaccaatatggtgaaaccctatctctactaaaaaaaatacaaaaaattagccggatgcagtggcaggcacctgtaatcccagctactcgggaggctgagacaggagaatcgcttgaacccaggaggcagaggttgcagtgagccgagatcatgccactgcactccagcctgggcgacagagcgggactctgtctgaaggaaaaaaagaaagaactgacgcagtcgtcttggggctgtgagtggtaaatgttaaaaaaagtccttacagtgacgatgttagagtggaaagatggaaggactctttggagacattgttgagccaaggaaccaaccctgcaaccaacctcctggcctccagacttcttttgtttttgagacaaatctcactctgtcgcccaggctggagttcagtggtgcaatctgggctcactgcaacttccacctcctgggttcaaatgtttctcctgcctcagcctcccgagtagctgggactacaggcgtgcgccaccacgcctggctaatttttgtatttttagtagagatggggttcaccatgttggccagcctgttctcaaactcctgacctcaggtgatccaccccacccgtcttggcctcccaaagtgctgggattacaggcatgagccactgcgcccggcctccatttttattttcttaattgtagctaagtcatatcagaacctgctgattaaaggagccaatattcactaaatgtattctcttccaggttgtgtgcttgttactttacattctgagagctcattttatgctgcttaccagggacttgttctattctccctttcattgatggggaaattgagacccatggggttaaactacttgtccagctaacatgtggtgcctgcgtgctacgtctggttttacccattctaccatgctgctcctggttaactctgccaccccactcaccttccccactgggacctcagccaaactcatgccttcactagcctgagcatgggaaggaggtcaattctctgctggttggaagtcaggatgtcaataaatatttacagaggagcaactaccatatgccactcagaagagaggggaacatgtgcaaaggccctggggctggagagacctcatgaagagaagtgaggttaccagttgagaagtggaggcagaggacaggagtttgagcccaagagtttgaggctgcagtgagctacgtcactacagccagtgcaacagaatgacatcctgcctctaaaaattaaaacaaaattaaaaagatgacacagaggaatgtctgcaaatcagtgagaataacacagcaaccccaataggaaaacaggcccaaaatgtgaataggcagattaggggagtgagaaggagaggagacaggagagtgagaagatgttagcatggttagaaagcaggggaggggatggggatgtagtggccccctaacctcaggttagataaagtacctgcctcttacagactcaggccaaatatttctaagatgggtaccaaggagcagaaccacttcccatacagtctatattcttgccactcctaggttgaggactgagtgatcctcttcaagttcattcttaaatcacccagctttccccttcttgaaaaaacgatttcttcctcttcttttttttttttttttttttttttttttgagacaaagtcttgctctgtcacccaggctggagtgcaatggtgtgatctcagctcaatgcaacctctgcctcccgggttcaagtgattttcctgcctcagcctcctgagtagctgggattacaggcacatgccaccatgcctggctaatttttgtatttttagtagagacagggtttcatcatgttggccaggctggtctcgaactcctgaccttaagtgatccacctgcctcgccctcgcaaagtggtggggttacaggcgtgagccaccccctggcgagaaaactatttctgaaattcattttctgaatcttcaaatgcagagtcaagttctttgctctcctcaggttacgggatatctttacctttggtctgtatgacgcctgtctcttgtttataccttcattcattcatgcattaattcccctatatctctctataccctactttcattcttctccctcccagagacaactgagagaatgtttaatttggccttataggagtgcattctcgcaaaaacacgtgcgatattttgagtgtgtctatttttaactgacataagcaggatgaagttagacacattctgttgtttcctgttttcacccagaaccatatttttattttttgttttttaaattttttgagacagagttttgctcttgtcacccaggctggagtgcagtggcacgatgtcggctcactgcaacctctgcctcctgggttcaagcgattctcttgcctcagcctcccgagtagttgggattacaggcacccgccaccacgtccagctaatttttgtatctttaatagagacagggtttcaccatgttggccaggctggtctcgaactcctgacctcaggtgatccacccgccttggcctgccagagtgctgggatgacacgcatgagccaccgtgcccggcaacaaccatatttctaaaagccccatcccgtagtatctgtcggatatgcggtctggagctctcactcattctggtgctccatgggtgccgctgtcacatgccgcctcctggtctccaggagggacaccaggtggccttcagctccccttatatagatggtgctggagtaagcattctcgtacctgcccctaacagacctggtaagaatgtccctgggatggatgcctggggacataagcgctgatggtgctggacctcactggactgagtactaccgatatgtctccagagtggcctccctgggccacacccctttgagtggtgcaagactttcctctgtgcccgcatcgctggaaacccttggcttattcacatattttttccccaatattaaaggtgtacagagatactgctttcatttccatctttctggttacaaatgactttgagtaccatgtcataggctgattagcttttcagacttcacttccctgatccgcctgttcacattttcggcctgttttcctattggggttgctgtgttattctggttgacttgcagacattccctcaggtagtctttgcatttttatttttactttattattatttatttatttatttattttgagacagagtctcgctctgtcgcccaggccggagtgcagtggcgcaatctcagctcactgcaacctctgcttcccaggttcaagcaattctcctgcctcagcctctcgagtagctgggactacaggcatgcgccaccatgcctggctaatttttttttatttttagtacggacgcggttttaccatgttagccagggtggtctcgatctcctgacctcacaatctgcccatctcggcttcccaaagtgctgggattacaggcgggagccactatgccccacctacatttttattttttatgtttagagacaggtctcactctgtcacccagactggagtgcagcggtgcgctcatagttcactgcagcctcaaattcctgggctcaagcaatcctgtctcagcctcctgagtagctgggactacaggcatgcaacactttgcctggctaattcttaaaatgttggtagagatgaggtctctctgtttcccaggctggtctcaaacccctggcctccagtgatcctcccaccttggccttccaaagcactgggattacaggtgtgagccactgcacccagaccctcatgtagccttgatcaacactgtctgacagaactttctggatgataaatctgttctcaatctgtgctgccaaatatggtagccactagtcacctgtgggttttgagcacttaaaatgtggctagtgtgaatgaagaactgagttttaaatttcatttaattctaaatcatctaaatttaaaatgaccacacagtgctagggacctctataacaaacagcagttagaagttaacccctgatcaattttttttttatgattctatccactatttaccatgtgctaattcctattctaaatgatttataaatattaactcattcaaaactcacaacaattccataggtagatactattttctccattttattgacgaggaaactgaggctcagagaggttgataactcacccaaggattcacaggaaatgggacaaccagcatctggatgtaaggtttggttcccgaaccacctgctattgcatcttttttttttggacggagtcttgctttgtcgctagactggagtgcagtggcgtgatttcagctcactgcaacctccacctccctggttcaagcaattcccctgcctaagcctcccaagtagctgggattacaggcacgtgacaccattcctggctaattttttgtattttagtagagatggggtttcaccatgttgaccaagatggtctcgatctcctgacctcgtgattcgcctgcctcggcctcccaaagtgctgggattacaggcgtgagccaccgcacctggccccaattgcatctttatttgaacaaatatcttagttttcatgtaatcatgtctttttttgccttagagtttgtgctttacaagttcagtggaggaagtccttctcccttcctgggttcacagctattctccagcattttttttcctttaatgtaaagttctccccactcacagaaggtcctcccaagctccttaaccttctacatggagagcaattcttcattttatttgtcttttaaagtaaaggattgaacaaaaggacatgtttctatttcgggtggtttctgaagccctcttaaagtacagtgttttcttaaataaagaggagtaggaacagaggcaaaaaccccataaggtggtgaggtaagtgattctagaagagacaggagctcgagagggatgagagctctggagaagtcaagaaggggaaattgccgggtgcggtggctcacatcggtagtcctagcactttgggaggctgagacaggaggattgcttgagtccaggagttcaagaccagcctaggcaacaaagtgagacctgtctttaccaaaaatgaagaaattagccatggccgggcgtgctggctcacacctgtaatcccagcattttgggaggctgaggcaggaggactgcttgagcccaagagttcaagaccagcctgggcaacatggtgaaacctggtctctacaagaagtacaaaaattagccaggcatggtggcttgtgcctgtagccccagctactcgggaggctgaggtgggagaatcgcatgagcccgggaggtcaaggctgcagtgagctgtgatcatgctactgcacttggttgacagggtgagaccatgtctcaaaaaaaaaaaaaaaaagaaaaaaaagaaaatcagctgggcacaacgttgcatgtctgtggtcccagctactaaggaggctgaggcaggacgataccttgagctcaggaggttgaggctacagtgagctgtgtttgtgccactgcactcgagcctggtcaacaagagtgaaactctgttcaaaaaaaaagaaaagaaaagaaaaaagaaagaaagagaagaatgggaaacttagtgaaggccagtgcattcacagtcatgagtgttttgaagggtactgttgcgagaccttgccaatcaccagggctagaggaggtggtgaaagagaaaactctccttgagaggctggaatgagaagataatgtgacttgggcaggtggaggcaggatgtcttccaaatagaggtgagaacatagtgtcagtggagatgggagagccaatggatgaatccaattgatggagtgaagctcttgaggaaatgaacaagtgcattacatttgaattcccagacattcagtgggaacctgctacaggagaggcactccaggagcaaaataaaaacaaactctcattcacaggtggtgggagttttaactggtccaaccacttgggaaaactgttaggcagtttcttttccttccttccttccttccttccatcccaaacacttgggaaaactgttgggcagtttcctttccttccttcccttccttccttcctttcttctttttgagatggagtttcatgtattctgccacccaggctggagtacagtagtgcaatctctgctcactgcaacctctgcctcccaggttcaagcaattctcctgcctcagtttcctgagtagctgagattacaggcacacgccaccatgctcggctaatctttgtatttttttgcggagacggggttttgccatgttggccaggggttttgccacattggccaggctggtctcgaactcctgagctcaagtgatttgcccccctcagcctcccaaagtgctgggattacaggcatgagccactgtgcccggccaattgttaggcagttcctaccaaagctaaaccaattcctccctctgactcagatgttccggtcctaggaatatctcccatagaaatatgaagagtggtcacccacagacatatctgagtgtgttcaaagtagctttctctggaatagccccaaagtagaaagcaccaaactgcccaccattagtagagtaaatgaacaggtggttcagcacacacagcgatgagaacaaatgaacagcaacagcacagatgaatctcacacatacaacgtcaagggaaagaagtcaatgcatgcatgctgtatgaccccatgtgcttaaagttcaaaaacaagcaaaactaatctagactgtttgaagtcaggatggagttactggtgacctcagaggcacaagggggtttctaaacgttggtgctgtttttttttccttccttcctttccttccttccttccctccctccttccttcctcgaagctgcagctgttccctccctcccccccttcttcttcttcttcctcctcctcttccctccctattttccttccttcctttttttctttctttagctttctctttctttctctgtcttcctcttttctttctttctctttctttccttttctttctttacctttctctctctctttctgtcttcctcttttctttccttttctctctctccccttccttcccttccctccctccctccctccttccttccttccttccctccctccttcctctctctctctctctctctctctctcttcccctccgcccccattgcccacgctggggagcgatagcatgatctctgctcactgcaacctctgcctcccagattcaagtgattctcctgcctcagcctcactcggctatgttctgtttcttgaactaggcgctggttacatgactgggctcagtttttgaaaatcactcaagctctacttgtatgatacatgtgcttttctgtatgtatgttatattcaataaaaggttaaaaatatatttaggaagtagctaacatttcttgagtgcttgctgtgggccaagtcttatgcattattttattcaatccccatgatgaccctacaagtgtggcggtggtgggtcctatcattccctctactttccaggtcagagaggtggggtcactgcttcgagttcacacagctagcacatggctgggctgggtcttaagcccatgtcctgctcaattctaacttctctgcaatgctctcaggtttggaaaagtaaaaggacaaggatttctcaaagtcagagggtaaaaaggaaaaaaacaaaacaaaacatgagatgatgatcccgccatacaattgcctgctaacttcatcaagaaacagttggaagatctcgaggaccaggtgaaggtttgaagcagggttggggtgaatttaataaagtgttgattaaacgttgtcaggggattctgaagactcagcttaagaggatacctgcaggaaagaaaggaactcttcctgcttcttctcttgaacaattttggctttaacgaccatttccccacaaggcaacaacaaatatttcatagttctactcttccaaagccctgttcacagcatcgtcactgtgggaggtgggcgcctatacccacttcactgataagcaaactgttggggctcagaaaacaataccccaaaatgaagttctccgaagcagccacagaagcaaaagtttttctctgaccttctcctgcccttctatctcttagtcccattctcccctggggctagccacaaaaactagaatccctcttccctaaggcgggtcgtagaaaccagacctcttttccccaaagtcagccctaacacctaaaaatgttactctaactttccctccacctttctttgtaaaaactagttataaaaaaattatctggccagctgtggtagctcatgctgggattacaaatcccgggactttgggaggccgacgtgggtggatcacttgaggtcaggagtttaagaccagcctggccaacatggcaaaacactgtctctactaaaaatacaaaaattagctgggcatggtggcgcgcacctctagtcccagctacttggaaggctgaggcaggagaattgcttgaacccaggaggcagaggctgcagtgagctgagtttgcaccacagcactccagcctgggcaacagagtgagactccatctcaaaaaaaaaaaaaaaaagaaaagaaaaagaaaaagaaaaagaaatgatctggctgggcacagtggctcatgctgggattacaaatcccaggactttgggaggcccaggtggtggatcacttgaggtcagcagtttgagaccagcctggccaacatggtgaaaccctgtctctactaaaaaatacaaaaattagctgggcatggtggtgcttacctgtagtcccagctacttgggaggctgaggcaggagaatcatttgaacccagaaggcagaggctgcagtgagccgagattgtgccactgtactctagcctgggcaacagaatcagactctgtctcaaaaaaaagaaaaaaaaaaaaaagaaattatctaacttacgttatttgaccgtaggttataaggatcccattccagagagggtcctgccccatacccagaaggaatgcatgctctgagagaccaagaagaatcaagacagcccccttattccagagagggtcctgccccatacccggaaggaatgcatgctgagagagaccaaggagaaccaagagagccccccctccattccagagagggtcttgtcccatacccggaagaaatgcatgctcagagagaccaaggagaatcaagacagccctttttgggtttccccactcagtctattagcatttacattgtacactttttgttcaatcatatttctacaccgctgtccatactttgttgaacctaagcttaaaaaacggacaatttcccctgcagctttgggtcttcattctgaaggctctcgtgcaaacacattaaataaatctgcctgccttttctccaattaatatgccttgtgagttgatttttttcagtgaaccttcagagggtcaagcccttggccactacaaaaccaaggttccggaaggccaggtgtcttgtcagaacactcattggttcatttcagagctgaacttgaactaaagctttctgactctactcttccccgtgagggaagcctccatcgcagcaaagcagctcactcaactttcttgcttctcaactgctcctttgcctagagagtctcctccctactgatccacagctctctgtctcccttcaaaactgcctcttgtgctgttttctctcttctccattccataacatgcatgggctcaggttacaccacagctgcgccggcccctagaactttctgggatgatggaaatgttctattctgatctgtccaatatggtagccaagagccacgtgtggctaatgagcatttgaaatggggctcagtggctaaaattttcatttggttaaattttaatgaatgtacatttatatttaaatagcctcgtgtggctagtggctatcctgctgtaccatgcagctctgcagttgaattatagagtggattacataatcgagggcgtgcagtccgtcacatgatggtgcaaactagtcattccctgtgtgccctctaggtcaatgctccagcgggctctgtgccctcgaggcggacccttgaagactacaactcccagaatgctttgctccgtttccggtttggtttggctgaggggaagcgctggcagaagatgaggggagggaaagagattggaatattgcttccctgctccctccctggttctgacagtagtcccttctgcacagctctgcctccactgggttccaggaaatgtagggctcgcgatggcttctctctgaggacctcaaacagccgttatctatttctctcacctgttcctatctctttaaggagtctcttcatggcatggtcttcttttgaaccatctagaagttaattctttttcctgttaggaccctgattggtatgaggtgggaggaatgaatggttcatgaaagctgcccacctgaagaccttgaagtccccccagtttctgaggtcaaagtctggagaagcaggatttgattctagatttccctacctcaagagggagggatgctctactgctttttttcaaataagacttcaaattgtggggagagacattcttccagattcttgcttcaccccattgtaaggcaaaggcaaatcctgagagctggaagcccaagaaacagaggaggtgggtggaagaactcaggagtgtcccttaaaactgtcctaagggtggaagaagataggaatgtcccttaaaattgtcctaaggtagggcttgcaaggaggtgacacagatcaaaatgtgaagcttgattctcagtgaggacccacgcagagactgatgtctgtctctccttcctggatgctcagttagactccgtttcccagctctgcaagtgggcgccgccatgtacgctctggtgacatcgatcaaaatgtggagcttgattctcagtgaggacccacgcaaagactcatgtctgtctctccttcctggatgctcagttagactccatttcccagctctgcaagtgggtgccgccatgtaagctctagccagtgggaggtagatggaagtcatatggactacttctgggtctgtcccagaaacatttctcctgtgcccttctcatgctcttttcccttctgtggcttgatatcaagaagcatggagactttggaagccatgggttgaagatgaggagctacaatatggaacaagcctgggcccctgacttactgcttagaggagaggtgcctgctgtttaagaatacattttttttttggccaggcacggtggctcacggctgtaatcccagcactttgggaggccgaggcaggtgggtcacctgaggtcaggagtttaagaccagcctgaccaacatggtgaaaccccacctatactaaaaatacaaaaaattagccaggtgtggtggcgggcacctgtaattccagctactggggaggctgagtcaggagaatgcttgaacccaggaggtggaggttgcagtgagccgagactgggccattgcactcatgcctggaggataagagcaaaactccgtcgcaaaagaaaaaaaaaaaaagaatacaccttttgaactttatctgtgcaagaacgaaatttttattgttttgagcccttatgcatgttgggattctttgttacagctgcaagcatatctaatacacttaataggaacttataaacagtaactaatacacttgggcaggtaaattgtcagtttcatgagaccatggatttgcctctttggttcactgatggatctctggtgtctagaacagggctgagcaggtggaagggttcaataagtgtttgttgaatgagctatcagcttccaatttttctttgcagctgactggaaagcagagaagtatagtagatgcaagctctggctcccaggtgggaaagggttgggtttatatcctgcctgattatttactaattgtctacattgggcaattgccaagcctcagtttcctcatagggaggttggagaattatataaaagctctttctttttgtggacagagtgaggattcaacgtgatcattcatgagaagtgctgagcacaccacctgatgcatagtaagtgctcaggaagtagcggtcatgattatctggacttttctcattctctgggcaaacaaaaagcacagaagctgcccctgcaataggctctgacaaatttcaggccccgaggggagggaggccaggcttgagcctgggattatagccaaagaccagctcaggaaacaatattacattcccatgatcctcctgcgatcccaggagggcttgagcctctgtttcttgtcctgacctcagactaactctgcagaaatgctgctcggggcttggactagctgctctggttcagggagccccattgagacctggaacttagagggcctggtggagtcctcaagactaatgtggggaatgagccatagtttaattcaggacaccccacttttttcaagtattattattatcaccagcctggagttatgcgtgattgggcagatgccttaggactgatcaggtttttctcctccattaattaaaatgtgaatcacagctgagtcactaaagaaaacggttaatgagcaattctgacttcctccctccttccttgctcagagagatgagtcagcagaagtccagatccaaaaatgagaagaagaagaagaagaagaagaagaaggagagaaaaggaaaaaaaaaaaagcccagaagagatgtagggcttgggaaagcaggagcaaaatgaacctgaaccatattattctttgtcttagcagaaaaaagttcccaaatcgctatcccaaggcctaacggtcaaatcctctaatgagcacgaccagttctcatttttacagacagacccacaggcacccagagatggatccaagccccagcaatctcctttcttgctttcctcaagcaacgacaggctcctcaccatgccaaaaacaaccaccaacctccacctttctttttctgcttcgttttccccacaaagcccaggctctcctttgaattcagacatcatggtcatgtttcataagataagggacgagtgaggagctggggtgcctccggtcaataggaaagggccatggggagtaacagtagaagatttcagaagtggggaggtccctcagaatcagggaagctacgtaactcaaaacatgattcctggagccaggctaagcctggatcctggcttcgtgtagagctaatcaatctttctgagcctcagttgtctcatctgtaaaatggggagagtaaaaatacctacgcagtgttgcaaagatgaaaaagtcagcacccatcagaagttaacaattataatattcattagaaaactatgatccaagaatttctgcctcacccatagggtcaccccaaagcaagatgatcagacaggttggggagatggtcctcactgagcactggcacacacacttgaacaggtgtgtgtgtgtgggtgtgcaagctctcatgtgtgtgcatgcaatttcccctcccaaatcaactgatcatgtataacactgcacattcgacttttgacttttgcaggatgaattttcatgatgcctatttatattttcaaattatgagcaggggctttcaccaattacccctgtcttgaccccttgttattcaaatgattctcttttgaagagcctgcagtgtcccagtccttgtcaatttttaactagatgaatactgtccagatcccatctgctaatgtctgggggtgtgatttcagcagcttgccaccatcatgctcactgactttaagaaatcttctattttttgcaaggttggtaatttctaagtcagtttgccttggacttgtgctagagtgtaagataatatttaacaatctagaacagtgactctcaaccaggggtgatttcacctcccaggggacatttggcaatgtgtggagacatttttggttctcacaactggggcgcgggcgctactggcatcaagtaagttgaggcagtgcacaggatagctcccattttggagctaataatgcagcccccaaagtcatcagtgctgtggcggagaaactctgacctagaacccagggggccatggcggtcctgaggcagagtcttgctctgtcattcaagttggagtaaagtggcgtgatctttgctcactgcaacctccacctcccaggttcaaacgattctcctgcctcagcctcctgagtagctggaattacaggcacccaccgccacacccagctaatttttctatttttttagagacagggttttgccatgttggccaggctggtcttgaaatcctgacctcaggtgatctgcccgcctcagcctcccaaagtcctggaattacagacctgagccactgttgcctgtccaggactcacttttacaagtagtcaattcagtcagttccttagggaccaaaaaatggattatgccaattttagggtccttctgcctctttctaaactacaatgaatttatactaagcgtggggctctgcagccagatttcctggattcaaattccaactctgccacttcctagctgtgtgaccttgggcaagatatttaacggctctgggtttccatgttctcactaatacatgtgaccaataaagcacccactgagtagttgtttgcattaggtaggctgatatgtaaagtacttacgacagtgcctgatacatagttgaggcatgagtgggaggtagactgaatccctggtgcaaacatggtgagcttcccactaaagattcacaagtgggactgggaaatggcagcctaatcagagactacatttcccagcctcccatgcagctagcctgggccacatgactaaattccacccaatagaatgcaggcagaagtgttgttcaccacttccaggaaccctcataagtacctcccactccactttcccttttccccagctgctgtctcaatgtaggctcttagaacaaccttggaagccacatgtttaagcagggagagcctccaacagcctggatccctgagtgactgcatggagtcgagccatatttgagtcacccaccactccacctcattgcacccctcaccagtttcactttattattttttatttttagtagagatggtgtctcactgtgttgcccaggttggcgttaaactactggggtcaagcgaccctcccaccacagcctcccaaagtgctagaattacaggcataagccaccacatccggccaccagttgtactttagaagttgatttctcactcatgcatactcttaagccagagatttttggttttattggttattgcagctggtgttaactaacacagcctcttcttccagcattgctttgtctctcttgatcagcaaatattatcatctcttcaacatctgaccagcttcaagacaactacagtcctctccttcatacctttcctatgagttggcaaataagctggggaagaagccccttctcccattggggatgaggaaagggaataggttccctaggccaggatcttagtaaagatctttgatacagaaacaagaagggatctgggagtcatgaccactcagcatctcaggccaaagaatgtgggtgagtaaaataatggtacaatggactttagagacttggggggaagagtaggaggtgagcactggataacagacaacaaatatggtgcagtgtatactgcccgggtgatgggtgcaccaggttctcacaaatctccactgaagaacttactcatgcaaccaaataccacctgtaccccaataacttatggaaaaataaaattaaaaaaaagaaaaaagaaaattaagcaaataaaaataatcaaaatctaaagaaaaccccaaaacctaacaatttctgaaaaaatagtatgtgggtatctgtttattaataaaacattcaattataatttcaacatcaattaattgatcagcataaataaatggaccaaatttcatatatatatatacatatatatacacatatatatacacacatatatatacatatatatacatatatatacatatatacacacatatatatatacatatatacacacatatatatacatatatatacacatatatatatacacacacacacacacatatatatatatatatatatatatatatatatatatatatatacttgcaagtgaaactcaaactcatattagtaccatcaaacagtagcaatatgtgccgacatctagatcgtctgctcaaatatcactttcccaataaggcctaccctgaccaccctattcaatgctgtatcttgcaccccagaaagtggcagggccaggacttgagcacagcactcccaaattccctttacccgactttactgattttcccacctgcgaacacaccatcgttaatgtttagggttctcaccctcccccacctcactacctcataagaaccagagggtctcctcatcacctagaatagtcatgggtacacagtagatgctaaataaatgttgatctgagtgaagtgttgttctttgcctgggacattctaagaggtttatacatatgaactcatttgcatgctcaaagcagtttgaccaagtgatgagtttaaaaaaattatctccattttatagataaagaaagacaggttcagagagagcactcaggcagaagtggaagagccaggatttgaacccagactgtctggtccctgggtctaggagctccagacactgctttgtctaggcccacaacacagagtcaacaaacccgggacaagtgtgaggggaacccaaaccagaggtgttcattcagtttttgtttgaaaaatacacaccatgttgcgtatgggtgtggatagggccaggctcacaagattgtgcttggcgacctttataaggagggaggacctgggtgcagtggctcatgcctgtaatcccagcatgttggaaggccgaggtggggggattgcttgaacctaggagttctagaccagcctgggtaatataaggagaccccatctctgcaaacaaacaaacaaacaaacaaaaaaaaactttaaattagctgggcatggtggtatgcacctgtggtcctagctacttgagaggctgaggtgggaggatagcttgaacctggaggttgaggttgtaatgagccgtggtcatgccactgctctccagcctgggtgacagagcaagaatgcatcccaaaaagaaaaaaaaagttggtacatatggtacaatggtacatatgttcaaatcttggcctcaccactctccagctgtgtgatcttggggcagtaacgtaacctctctgtgcctcaagtcttatttataaaatgggttgttgggaggataaaatacattgacatttgtaaagtgctcagaacaggttcataggcacacatatgcacatatgtgcatatatatatatacacatatacacacacacacacacagtaataaggttcatagttaatgctgctatatatgtttctgttaaggaaataatggtcacagcttccacccggagctcaggagcgtggagcaggccacctgagagcagagccaatccctgcactgtattcagcctcatgccacctggggaacagtgtgttccagtcaaaagagctaacagcgaccttccaacagctcctgctaattttaaggacaagcctctcagtgctggcgctggagtcaattgttgctttttcaacaacagcaccaggtgtgtgttaagaggcgtgccatcaggaaggcatcctctcccgagaaagctggaagtggcaagtggcccaggctgccctgaacaggacagaaaatggttcagagcaaagctgaggtaggcagggagaaaagataccagggccgtatcctctgtgtcctccccctgccaggcagaataatctggcattgcttaaatatggtacaagtcccgtgatgtttccagcctgcaaagcacctacagctccaaagtgctttccagaaatgagctaactaatccccaggggtgggtcatgatgctaaacgtgaaccatccctgaggggaaaggtgtggaagagtgttattccaagaaaacaggcaaaactgcagggcaaggagtgagagactgttagtaagaatgatgataaaaatgatattattattattactcatattattatttgagatggagtctcactgtgtcacctaggctggagtgcagtggtgtgatctcggctcactgcaacttccacctcccgggttcaagcgattctcctgcctcagcctcctgagtggctgggattacaggcaccccgccaccacacccggctaatttttgtgtttttagtagatggggtttcaccatgttggccaggctggtctcaaactcctgacctcaagtgatctgcccgccttggcctcccaaagtgctgggattacaggtatgagccagcgcgcccggccattattattatttttgagatagggtctcactctgttgccctggctggagtgcagtggtgtgatcacagctcactgtagcctcaacttcctgggctcaagcaatcctcccacctcagcctcccaagtagctggaactacaggtatgcaccaccatacctggctaattatttgtatttttatttttattttttgtaaagacagagtctccctatgttacccaggctggcctcgaactcccgtgctcaagcaatcagcctgcttctgcctcctaaagtgctgggattacaggtgtgagccattgctcctggccatattattggtagtagtattgcattattatcaacagtctgtaatatttcttgagcgcttacaaggagccggatactgttctaagagctgtatgtcaattatttcaataaatcctccataactgtatgaagtaagagtgttattatccccattgaacagatgaaacaaatgaggcccacagaggtttgggcatcagctccaagtcacacagcttgcaagaaggggagctggttcaagcccaggtattctgataacatagcatctctatcatcctcaccattataatgatgttctgtatatttcacagtatttgctggggttggctactgttgacgccattttacagatgagaaaactgagttatagagggacttgctgactggcccagggtcacatagctgagaggtggcagagtcagaatgcatccattcatgtggtctcagcagccacatcagcaccaatgggacttcgatattgcctggatggtcttccctctttccatatgccagctttatggagaacagagtctggacagatgcagtggctcacacctgtaatcctagcattttgggaggctgaggagggaggatcgcttgaggccaggagtttaagacctgcctggtcaacatagtgaaaccacatctctataaaaaaaggtaatataaaaaggacgggcatggtggctcatgcctgtaatactagcactttgggaggctgaggcagactgatcacttgagcccaggagctcaagaccagcctggccaacataggtgaatccctgtctctactaaaaatatagaattagccaggtgtggtggcgggtgcctgtaatcgcagctacttgggagtctgaggaacaagagttgcttgaacctgggaggtggaggttgcagtgagccaagatcgcgacaatgggcttcagcctgggtgacagagggagactctgtctcaaaaaaaaaattatatatatatatatatatatatatatatatatatatatatatatatgaagggaatctgatccctaacattagtggaacagcttcaattcagggattgagcaggaggagaggctggtgcattcagtgtccactccccagcatcagagtggattctacccagcttggtgagaattctctgtacccaatttgccctttgatactgcactgggcagagagggtgggtgggcatcctcctactagggcaggaggagtccttcacatatacctgtattctgggccatcacccttcagccagagtcatccttctaaataaaaagctaagcacaaccaccccttgtctaaatccttccatggctcccttgtgccttcaggataaagtccaaactcctcaaaacatgggttggttcctgctgaccttctgtaggttcttctcttgccatttccctctcccaacacacaagcacattcacacacacacaaacacacacacacatgcacacatgtatgcatgtgtacacacatacccacacacaagcacagctctgtttacctgtttcctgtataaaccctatgatgtggaatcccagctctgctacctgggcaagtcacttaacttctccatgcctcatttttctcgtcagtaaaatattttgctctcctgtgcttctctagactagaagaatgcctgacacacaaaatgcaccaaatggtcattttctgtttggttttgtgaaagacaaaacgcgtagacagtacaaaattcagaaagacacaagaaagtaagtttcctttccacacctacttccaaatctttcagggtgccgctacagaggcaaacacaattattaatttctcatggaatcttccagatttgctcttacgagaaaatggcggcaccattcaaaaactgcttttgtcacctgataacatatcttggatatagagattcctatttccttctctgtaaaatggggatatgaaagaatccacctcacaggcttgttacaagaattaaatgagttaatactcactttctaacagcacttgtatacagtagacaccctataagtactagctcttattgacactcagagatctgcttcttctttttgtaatgacttcataacacgctaagggatgggtgtaccatagtttatccgacagttcttgttgatggagacgtccatcaatggagtcttccaattgttatgctgcaacaatgcttctctttgctgtaacaatgcttaataaatatggttcacgtctgtaatcctagcactttgggaggccaaggcaggcagattgcttgagctcaggagttagagaccagcctgggtgatatggtttggctctgtgtccccacccagatctcatgttgaattgtaatccccaatgttgggggagggacctggtaggaggtgattggatcctgggagcagatttcccccttgcttttctcatgacagtgagtgagttctcgtgagacctggttttgtagcactccccccctcactctctctctcctgccaccatgtgaagatgtgcttgtttccccttcattttccgccatgattgcaagtttcctgtggcctcctcagccatgccttccgcacagcctgtggagccgtgagtcaattaaacctcttttctttataaactactcagtctcaggtagttctttatagcaatgtgagaacaaacgaatacactgggcaacatggcaaaaccccgtctctacaaaaattacaagaattagcctggcgtggtggcttgtacctgtggtgtcccagctactcaggaagctgaggtgggaggactgcttgagatggggaggttgaggctgcagtgagccacgatcttgccactgcactctagcctgggcaacagagtgagaccccgtttcaaaaatatatatgtggtgaaacaaaagaactaatgaatgaagaaataaatggaggaatactttgagcagggtataaggaacctgggtaagtttcagagattccaagatcttcaaaggtacctttctaggcactaagtccttttacaaattcctttcatgtggcactaacattatatgttcaatacaccagcatgatcagattataccactgtgtgtggggtgctagggccattctttgatggagaactggtctacccattgcaatcattctcacagatgcaagctgagctggttcacaggtgagcaactgttcttgccccaaagaatgtagttaatgttcttcccataagctcatggcttttgagaatactgttggtcccaaaggggagacagtagttggtcaaaggaataccacctcagcccaggaaggggactgtgtactgaaggaacagtaaggtgtccttgaggggtttgaagggttcctggtgaggctcgattgtgttgtaggatgaaggctgaagagtggggtgggaggcagggacgaggaaggagatgggtcatgagctctattaaaatgtatttttgtaattccgagttgaaaatagacataccgacttcatgctgactgtttcggcttcgtgacatagcctggctcgtgggggccttcccattcagcacgtctccgtggcaacaggccactttctcattcacgccatctccagggttaccttgcttggctcattcaggactgttgccatagagacaggtccattgatacaatcttgacgctttggaactttgctttcccgaatgatggagtattggccgtggggtacggatgacattgtgatagggtgtgaggcgaagagagttctgggagttgaggtataaagacttaaaatctggcaagaggaagatgaggtcatggtaggagatatggtaaggcagtagtagaccaatatcattcctgatcttgacatgtgaaatggttgatcctttgacaatcctgtgtgtgtgtgtgtgtgtgttgtgtgtctgtgtgatgtcttttattagactcaaagtacaaatacgccaggcacttagccttgtcattgttgatgtctgtatctccagcatctagcacagcgcctggtacaaagtaaatgtctcctcaaataataataagaagaagaagaataagaatttctttttgaggcagggtcttattctatcacccaggctggagtgcagtggctcgctcttggctcactgcaacctccaccttcagggctcaaatgatcctcccgttttagcctcccgaatagctgggactacgtgcatgccactatacctggctagtttttgtattttgtgtagagacagtgttttgccatgttgcttaggctgatctcgaactcctgattcaagctcagaagtgaatcaggagttcaagcaatcctcccaccttggcttcccaaagtgctaggattacaggcatgcaccactgcactcggtctacccacaaataattattgaataaattagaacttgttgtttgcagtaaactgtaaaaatataaattgtccttgataaaccataaaaatataaaaacattagaagagaatttccacaagcaaccaccactattatttactctctacctcccagcatgtatgcccatatagtgcattttctcctgtttctatagataactgtgtgtgctgtcatctaaagtgaaaccttccacctgtacaccaaatgccatcccctctcgtccaccaagagatgtcctcctgacactcttcttcctccagcatcctcatgtttttctcccctaataggttattcctatcagcataaaatctgctgttaggtctcccatcttttttttttgagacagggtcttgctctgttgtccagcctggagtgcagtggtgtgatcatagctcactgcagcctcgacctcccaggctcaagagatcctctcacctcagcctcccaagtagctaggaccacaggcatgcaccaccatgcccagctaattaaaaaaaaattttttttgtagagatggggtctcactatgttgtccaggctagtctcaaattcccgaggtctcagcctcccaaaatgctgggattacaggtgtgagtcattgtgcctggccttttttttttctttattcttttttctttttttttttttttttaagggaaacaaacctctgaaatccacttcccccaccagctaacacatgccccatctctcttcctctacccttcacagcagaactctttaaaagagctagtagtaatccttccagtagcctcttgccttcacctcttcacctaagcagctctggctcaggtcacgaaagatctccatgccactacatccaatggttgattctcatttttcatttgagtcaacacatcagcatcagtggacatcattgatcattccctcatacttgaaatggcttagcactttccttgcatgacagccagcacccacattcttctgatttgctccaattcagtcttctctgctggctcctcctcatcttccccaacctctttaatgatggagagtaagccctgggctcagtcctgggtgctctcctgcatctatgcccttattcagttccttaaatagcctccacaggaggctgactcctgcctttggatctccagctctgacttaccttttttgaattttagactccaattcctattaggctggtgcaaaggttatttcctttgccattacttttaatggcaaaaccgcaattacttttgcaccaacctaatagatggccaacacaatatctctatccatcagtaggcacttcatagaaagctgagttcctaatctgcccacctagtcagtctccttccccattttatttgatggcaaacccatcctttcacttgcccatgtgatagggtttggctgtgttcccacccaaatctcaacttgaattgtaataatccccacgtgtcaagggcggcgccaggtggagataactgaatcatgggggcagtttcccccatactgttcttgtggtagtgaataagtctcatgagatctgatggttttataaatggcacaagctctcttgcctgctgccatgtaagacatgcctttacttctcctttgccttctgccatggttgtgaggcctccccagccatgtggaactgtgagtgcattaaacctctttcctttataaattacccagtctcaggtatgtctttattagcagtgtgagaagagactaatacaccatgtcaaaaaatgtggggttctccttgacttccctctctctctttctctctctttctccttctctctctctctctctctccccattctcctttttgagacagggtctcactttgtctcccaggctgaagcacaatggtgcaactacagctcactacagcctcaactttctgggctcaaatgatcctcctgcttcactgtcctgagtagctgggattacagggacacatcaccctgcctggctaatttaaaaatttttttttgtagagacaggggtctcactatgttgcccaggctggtgtcaaactcctgggctcaagcggccttccccacttggcctcctaaagtgctgggattacaggtgtgacccaccgtgcctggcctctctctttctcttaaagttcatactcagttgagtctgcaaatctaaaattaagtcaacacagatagtgaaaccaaccacccctccccacctccatgaccacagccctgacttgaggcctccgttactgcttgctcagaacattgcagacaactcccaaatgagatccttgtttccacgccgcctccagtgtattcttttttagatgttttatttgttttcttttgcagaaaagaggtctcactgtgttgcccaggctagacttgaactcctgggctcaagcgatatcctcctgccttggcctcctgagtatctgggactgcagccatgtgccactctgcacccagcaattccttagcattgacaagcatatggtgataatataagatacaaacaacaggagaaactgggtgaagggtatgtgggaactctttataatatatttataacctttcttttttttcttttcttttttttttttgagatggagtctcactctgtcacccaggctggagtgcagtggcgcgatctcagctcactgcaacctccgcctcctgggttcaagcaattctcctgcctcagcctcccgagtagctgagactacaggcgcgtgccaccatacctgactaatttcgtattttcagtagagacggggtttcaccatgttgcccaggctggtctcaaacgcccaacctcaggtgatctacctgtctcggcctcccaaagtgctgggattacaggcgttagccactgcgcccagctacaacctttctaaaagtctaaattactctaaaataaatatttaaaaaataacatttgtttggtagaaagggtccactgatttaaaaagatttgaagactactttggtaggcatttctgaagtgggacatgttatggtgtgacttaaatattaggacaaaatggtgtggttggaagttcagaaagtgggttaggaccaggtgtgggggctcacgcctgtaatcccaaggctttgggaggcacaggcaagaggactgcttgagcctagaagcttgagaccagcctgggcaacctagcaagaatccatctctacaaaaagttttttgttttttttttttgttttttttttagatggtgtctcgcgctctgtcgcccaggctggagtgcagtggcgtgatctcagctcactgcaagctccgcctcccaggttcacaccattctcctgcctcagcctcccgagtagctgggactacaggcgcccgccaccatacctggctaattttttgtattttcagtagagatggggtttcactgtgttagccaggatggtctcaatctcctgacctcgtgatccgcccgccttggcctcccaaagtgctgggattacaggtgtgagccaccgtgcccggcctacaaaaagttttaaaaattagccagtgtggtggcacatgcctgtagtcccagctactagggaggccaaggcaagaggatcccttgagcccaggaggtcacggctgcagaaagtgattatagtgccactgcactctggcctgagtgacagagcaaggtcctgtcttaaaaaaaaaaaaaaaaaaaaaaaaggccaggcacagtggctcacacctgttaatcccaacactttgggaggctgaggtgggaggatcacctgaggtcaggagttcaagaccagcccggccaacatagcgaaaccccgtctctactaaaaaaaaaaaaaaaattgccgggtgtggtgccaggtacctgtaatctcagctactcgggaggctgagacaggagaattgcttgaacccaggaggtggaggttgcagtgagctaagatcttgccattgcacttcagtctgggtgacagagccagactctgtcaagaaagaaagaaagaaaaagaaagaaagaaagaaagaaagaaagaaagaaagaaagaaagaaagaaaaggaaggcaagggaagggaaaggaaataaaagaaaagaaaggaaggatggaagagtggaaggtgagataaaagcagatagaagcctgggcaacatagtgggaccccatctctacaaaaaatacaaaaattagccaggtgtgttggtgcccgtctgtagtcccagctactcaggaggctgaagtgggaggatccttgagccaaggaaaaaattgaaactgcaatgaactttgagtccgggagtttgagaccagcctgggcaacatagggagactccttctctataaaaataaataaaaataaattagccaagcatgatggtgcatgcctgtggtcccagctactcagaaggctgaggcaggaggattgcttgagcccaagaagtcgaggctgcagagtaagctgtgattgcgccactgcactccagcctaggcaatagagcgaggctctgtctcaaaaaaaaagcaggcagatagcagcgaaggacaatgtgccacattaaggagcttggatagtatcttgaaagcaataagggtttaaaaaccagggaatgttggagacacgtggcacaagaaaggtgtcatctagatggacagaagaccctcatgatcccatgacagcgactgggaaggggtaattaaaaacaaagaaacacaagccaaaagcatcatcaggctgagaagagaaaatgtcttagcatggctgagaacacactcaagaaatagaagctctgccgggtgtggtggctcatgtctgtagtcccagcactttgagagaccaaagtgggcggatcgcttgagcccaggagttagagaccagcctgggcaacacggcgaaactccatttctaccaaaagtcctaaaaaaaatttgcccgggtgtggtggcgtgtgcctgtagtcccagctattccagaggctgaggggggaggatcgcctgagcctgggaggtcaaggctacagtgagctgagatcacacctctgcactcgagcctgggtgaaaaagagagatcctgtctcaaaacaaaagcaaaacaaacaacaacaacaacagaagagaagttctgagatgcccatgtaggacagctggttactcattgggggactttcccaaagcgattttggggaaggtaggaactactgggatgaggagggcataggagatgggctgtattcccagggagcttaaaggagtcagggcagaggcttcagagtaggaatcagggcaggatttgggggatggaagatcctgtcttcctccgagacagagagaaggcgggtgtgtgtgcggcgcggaatagaggcaggtggtgccgacaaggaaacgtgcggaaggaagggagatagacgcaatccctgcatatttttctcagcccattctgtgctcttcacaacacgcctgcctttatgacctgggggacagggtgagaggcttctgcatgtcagagctagactgagaggatgttcctcccttgtcttcagagctgagtgggtcataacatttagaactagatgaggccaggcgtggtggctcacacctgtaatcccagcactttgggaggccgaggcgggaggatcactcaaggttgggagtttgagaccagcctggccaacatggcaaaacccggtctctactgaaaacacaaaaattacccaggcatggtggtgcacgcctgtagtcccagctactggggaggatgaggcagagaattgcttgaacctgggaggcggaggttacagtgagccaagatcatgccactgcactccagcctggtcaacagagcgagactctgtctcaattaaaaaaaaaaaaaaaaaaaaaaaaaaaaaagtagatggggcctcagaattcactgaggccaatttcctgatttaacaatgaagagaaaactccagagggactgagggagctgtccaaggtcacctagcaagtgagggacagatctgggatcagaagaccagtctctcaccagctggcctgtgtcttctactgcactgtgctggtccccacaggcctctgagcggtcctctctgatgaagcttcctacgctgataaaaatattctctatccatgctgtccaatatgatagccaccacccacaagggatgattaagcacttgaagtgcagcctgtgtgagtgagaaacagaattttaaatttcgcttaattttttttgagacaaggtcttgctctttcacccatgctggagtgcagtggcacaatcacagctcactgcagccttgacctcttgggctcaagcgatcctcctgcctcatcctcccgagtagctgggaccacaggcctgcaccaccacgcctggctaatttatttttattttttatagagatggggtcttcctatgttgcccaggctggtctcaaactcctgggctcaagcaatcctctggcctcagcttaccaaagtgttgggattacaggcgtgaggcacagcatttaggctgtgtgcggtggctcatgcctgtaatcctagcacttcgggaggccgaggcggtggatcacctgagatcaggaattcgggaccagcctagccaacatggtgaaaccctgtctctactaaaactacaaaaatcggccgggcgcggtggctcacacctgtaatcccagcactttgggaggctgaggcgggtggatcacaaggtcaggagttcgagacaagcctggccgacatggtaaaacctcatctctactaaaaatacaaaaaattagctgggcgtgttggcgggcgcctgtaatcccagctactcaggaggctgaggcaagagaatcacttgaatccaggaggcggaggtggcagtgagctgagatcgcgccactgcactccagcccaggcaacagtgctacactccatctcaaaaaacaaaaacaaacaaacaaatttaaaaaatccaaaaattagctgggtatggtggtgcatgcctgtagctacttgggaggctgaggcaggaggattgttgtgtatattttgccacaatcaaaacaaaacaaaacccaaaaccaatttaatatccacatacggatattaatatccaaatacgtgcaattggtgaccgaattgcacggtacagctcaaagaatgtttccaagaatggcttttgatgaccacctcaaagctcacagtctttccagagagaccgtcaccctctccccaagggggcagcctgatgttccaggaggtggcagccactcgtccaggtcagaaagcgactgccaagaactcactggaccttggaagtcagccagctgccaatctgtcagcttgcatccggagggctggagaagaagcgctgtgttaactgtgcaactctgtgctgctgtgcacgctcggtatgtgggtcccgaggggtttccactccactgggcaggaacagggagggaaggctgtcatgtttcggtttctgaatgtccagctgctgtgacagcaggaaagagtcgccaagggctgagactggtgggtgggctggctccccagatagaacaatccacccagagcccattctgtaggtagtgaggcagcctccatcaaaccagtcgtggattctctgtttctgtagagctctgcctgtttatgcctcactttctggggatgaactggcctgggcttctgcaataatttcagcacaaggagttaaaagagaaccatagttgcccagtgtggtggctcatgcctgtaatcccagcactttgggagaccgaggcgggtggatcacaacaaggtcaggagatcgagaccagcctggcccacatggtgaaaccccatctctactaaaaatacaaaaattagctgggcgtggtggtgtgtgcctataatcccagatatttgggaggctgaggcaggagaatcgcttgaacccgggaggtggaggttgctgtgagctaagattgcactactgcactccagcctgggtgacagagcaagactccatctcaaaaaaaaaaaaaaaaaaagagaaccatagcatcttccaccaagacacagacctccatggccagccctgtcccctgtcaagagctctcccggccccatgttcttttccttcctggcggttagcacagtagatgctcaaaaaggtatctgtgacaatatttgtgttgcaaatgatgtcaaaactgtgcaaaaccatgttggtttgaatcctggctctgccacttactgttcctcctcaggtgagttacttaaccccactctgtcttgatttctctgtggttttccccatagagagaagacatttgttaatgtatgaaaagtccttagaacaatggaatgaagcttccatgaagtcagctttctcaggtccacagcaaatatttgggggagtggaggtgggggcagaacccttcaggcattcagtacaaggtagtggtgtgtgtacgtgggaggcagtcccagatgtcagaacctgaattcaaagcgcattctggctgtagtgggttgaacagtgaaccctccagaagttatgttgatgtcctaatccctggaatgctaccttatttagaaaaaataaggtatgcaggtacgatttagttaagaatatgagggcaagagtttattcctggattttctgagtggggcctaaatgcagtcatatgtatccttatgacacagcagaagagggaactttgagagggaagaggagaacgccctgtcaccactgaggcagagactggagtgaagcaactccaaatccaatggaaggatcctcccccggatcctttggagggaccctggtgacacctcgatttcagacctatggcctccaaaacagtgagagaatacatttcccttgtttgaagccgtgtggtttatggtacagtcatgtgctacataacgatgttttgatatgttttgatcaacagcggactgcctatacaatggtggtcccatatggttataactgtatttttactgtaccttttctgtttagatatgttttttattttttatttttttgagatggagttttgctctgtcacccaggctggagtgcagtggcatgatctcagctcactgcaacctccacctcccaggttcaagcgattctcctgcctcagcctcccgaatagctgggattacaggtgcctgccaccacacctggctaatttttgcatttttcagtaaagaaggagtttcgccatgttggccaggctgggctcgaactcctgacctcaggtgatctggaattacaggcgtgagccaccgtgcccggcctagatatgtttagatacacaaatacttaccattgtgttacaactgcctacagtattcaagacagtaacctgctgtgcaggtttgcagcctaggtgcaatagggtatgccccataactgaggtgtgcagtagtttataccatctaggtttgtgttaagttctctacatgatgtccacacaatgacaaaatcgcctattgactcagttcttagactatatttccaaggctggaaacagtggctcatatctgtaatcccagcactttgggaggttaaggtgggaggctcttttgagcccaggagtttgagaccagcctttggtaacatagggagaccccacctctacaagaaatttaaaaattagccaggtgtggtggcatgcatctgtggttccagctactctggaggctgaggtgggaggatcgcttgaacccaggtggtcgaggctgcagtgagctgttatcaggccactgcactccagcctgggtaacagagtgagaccttgtctcaaaagataaaaagtatcccccaggacaatgtcagttaaacaagatctgtagattttgttatctaattagacccaggatagaatggatgtgggacaagtaagaatgctgttaaaatgaagaaaatcctggccgggcatggtggctcatgcctgtaatcccagcactttgggaggccgaggtgggtggaccacttgaggtcaggagttcgagaccagcctggccaacatggtgaaaccctgtttctattaaaaatacaaaaattagctgggtatggtggcggacacctgtactcctagccactcaggagactgaggcaggagaatcacttgtatctggaaggtagaggttgcagtgagccgagactactacactccagcctgggcgacagagcgggactctatctcaacataaaaataaaaataaattaaaaaatagagaaatgattaaaaaagagactgctgttgactttggaatttttgggcaggggtcagcaaaccccatgggctggccatctatttttataaagttatgtggaattcagctgcatccattcattgacctattgcacagaaaggctcgctctctctctcaagcagaaggaggctcacttcatggtctcttttcttaagtaaagcagtgaattgagttgaatactatttcccccaaattcgtgtttaccgaaacctcagaatgcaatcttgttttgaaataagctctttgcagatgtaactaattaaggatcttgaggtgagatcatcctggatttagagtaagccctaaattcaatgactggtatccttctaagaagaggaaaggacatagacacacagagaaaaaaggcaaatgaagatggaggcagagattgaagtggatgccagacaaagaataccaagggttgccaggagccaccagaagaggcaaggaagaattctttcctagagcagttgtcaaggtggctctgctgacaccttgattttaggcttctagcctccagaactaagagaaaataaatttctgttgttttaagccgccaagttcatgttactctgttataacagccctagaaagccaatatagggagagaaagatgaggtgacatgcctttgcccctgatttaatacttcagttaattctggaaaagaaccccttatcagataggtcctgtttgacaatttgattcaataaatatggtagcaaccactggatgtccaccactcccccatcccccaccatcttctacagtaatggaattttagccaagtcatggagttcccaacaaaactacatttcccagcatccctagcagtttggtatgatcacatgattaagtttccatcagtgatatgtcagtggaagtgacagctgccacttttgggtctgagacttcagaaattcaaggtctgcctattcaagaccagttaagttttgattgtgcaaatggtgctgaagatcatttggtggtagaaaagaagagggcaacaggagcctgaatccctgagtgactttgtggaagtgagcttccctgccaacctgcatggctaaccttgcagctattataggagagaaattatttttttttctttaaggttttaatccggtggccttttgggtctcttagtatggcagcatacctttgctacataatataataaatattaattatgtacccaggaagttgtagtcatgggggataggacaatgactggatgggtagggccctgctctcatggagcttacaatctaagggaaggaaagcagataatttaaacctcaattataatacagggggataaaaaacctggtggaagagcactgctatggtctgaatgtctgtgtctttctcaaattcatatgttgaaacctagtcaccaatgtgaagatattaggaagtggggcctttgggaggtgattagatcatgaagacagagggattcatgctctcatgaaagaggtttcagagagctgcctcaactcttttcaccatggaaagatgcagtaggaagaccccttctacgaaacaagaaatggcccctcatcagacaccaaatctgtcagtgccttgatcttcccagcctccagaactgtggaaaataaatttctgaggtgtataagccacccagtttaaggtattttattatagccacctgagaggattaaaacaggtgctctctgggcaaaggaagtgtcctcatccagatttggagggtcaggagagggtttttggaggaaataatgcctattctgagacttgacagcaaagggtggaaagaagaagagtatttcaaaaagaaggaaaaataattccaaggctatccagtgacagaaagtataggatgctaggggatccttaaaaagttcaatgggctggatgtggtggctaacccctgtaatgccaatactttgggaggccaagatgggaggactgcttgagcccaggagtttgagaccaacctgggaaacatagtgagaacccatctttactaaaaataaaaatattagctgggtgtaatggcatgcacctgtgggctcagctactcaggaggctgaggtgggaggatcacttgagcccaggagtttgaggctgcagtgagctgtgactgtaccactgcacttcagcctgggtgatggagtgagaccacatctcaaaaaagaaaagttcaatgtagctagagtggagagataacacaggtgatatgggtcaaggccagatgacgcagggtctcaaagacactgctaaaagcaatgggtcaccttgagaggacttgacaagaagaaagacttggtgagatttatattctgtgtagtaaagagttaactccttggggttggggagttcaaactctgcatattccaaaggaaggactggcccttggctggctcctggaaagaatatctgtatatctagggctttgggccatgcctggtagcttatgctcacaatgggatctatggtgactgcctgtttgtgttcagctggggccctgggacacacggtatcagtttgatcttggagtgtgctggagacccagcagttaaagtcagtcacatgggtgctccatgtcaatgtaactgagccccaataaaaaccctggacaccaaggctcaggtgagcttctctggttggcggtacactgtacattgtcacacaccattgctgggagaattgagcactgtttgcataactccactgggagtgaacagctggaagctcatgcctgatctcccctggacattgccttgtgcatcttttgctttgcagattttaatctgtattatctgtattcttccactgtaataaaccataactgaatttcacagcttttctgggtcccgtgagcccttttagcaaaccttcaaacctgagagtggtcttggagaaccctgacacatactcttacaaccttgaagctactccaggtcaataagattcttgttctagttgcatctcaagagaaaagcaattccctctctgacgaactttcagatgtcctacctgcttgctggccacaggactttaggggatttggagatggacaaaactggcctctgtctccaagcagctcagagtctagagggcaaggcagaaaggagaccaaagacagcaatcagcacgtggtgtgcttttatggcagagtgcgtgatggagggctagtgggttcatccctaccttaaattctggccaggaatggggacaagtcacagcacccagatcagagattaagttgatgaagcttgggggaatggtgctgtgtatctcaggggagaaggaggtgaagtgaagccaatgctgtgtgggccaggattgaatcccagagagaattttcttttcttttcttttctttttttcttttttgagacaaggtcttgctctgtcactcaaatgggagtgcagtggtgcaatcttggctcactaccacctccacctccccaggctcaagcaatcctcccacctcagcctcccaagtagctgggatacaggcatgcaccaccacgcctggttaatttttgtatttttttttgtagagatgaggttttgccacgttgcccagtctggtctcaaactcttgagctcaagtgatccacctgcctcagcctcccaaagtgttgggattacaggtgtgagtcactgcacctggccaagagttttcttctagaaagtccgcctgaagttgtgcagcatttccagtagccagagctactctgagagataaatgaggctctttgccaatgttggctaaaatctaaaacatcacccaaggcaacctgtatcatactctctgacttctcccctccacagcccccttgccctgccctccagggagtgtcccttgcaaatgtcactgttcttccttccctttcataccaccttcatttaacaatcaaaacagctggccaggcgtggtggcttacgtctgtaatctcagcactttgggaggccgaggctggcagatcgcctgaggtcaggagtttgagaccagcctgaccaacttggagaaaccccatctctactaaaaatacaaaacaaacaaacaaacaaaacaaaacagctaggagtggtggcacgtgcctgtaatcccagctactcaggaggctgaagtaggagaatcacctgaacctgggaggtggaagttatgatgagccaagatcatgccattgcactccagcctgggcaacaagagtgagactccgtcacaaacaaacaaacaaacaaacaacaacagtcaatgcatgccaagaactgtgctggatgttctattacttatttattttattttttaacttaatttgtatttatttttatgttttagaggcagggtcttgatctgtcacccaggctggagtgcagtggcatgatcatagatcactgtagcctcaaactcctaggctcaagtgatcctcctgcctcagcctcctgagtagctaggactagaggtatgcctgcaccatcatgcacactaacttattttattttacttttgcagagatgggggtcttgctatgtttcccaggctggtctctaactcatggcctcaagtgatccctccaccttagcctctcaaagtgctgagatgacaggcataagtcatagttcttggccatctactcttttaaataatccacacaacagacatctatttctttttttgagacagagtctcgtcctgtcacccaggctggagtgcagtggtgcgatcttggctcactgcaacctctgcctcccgggttcaagcaattctcctgcctcagcctcccaagtagctgggattacaggcacgcaccaccacacccagctaattttttctatctttagtatagatggggttttaccatgttggccaggctggtctcgaactcctgacctcatgatccgcccaccttagcctcccaaacagctgggattacaggtgtgagccactgcgcctggcccagacatctatttctaatgcagtaagctgggtaataagactgactctcttgctgaaaacgatgacaaatcctgcataaaatctgaagtccatgttgttgaaacaagaaaggcctgacaattagtagttatcagccccaaataaataagtgaagtcaagaatttcccagaggtaacctgagcatctaccagagcattaaaaccacttttgccccaagggcatctgtctaacccatggaactgctgcttcaagttttatggcctcctagggagcaggggtggggcaaagtccagggtacacacgtgttagaaagtctcaaaggagacacaccactccccaagtaggatggggccccaataggctatcactttcaggtaagaaacctgaagttaatttactcccgtctttccattcccagagatttttgaggaagttactttggcactttgcagaaaaggagaaaaacaaaagtttttgagaaattataaccacaagctggcttttgcagacactggtgacctaaattctcaacacattgttggtctaaaagtctaagatggtcctagactgggagtttcccagacacctggaaaaagtaaatgcaaattgtccatggagggttcgccttcatcgcaggcctcaatgaactcccttcaacagtgtcccatggatgccgggcacggtggctcacacctgtaatcccagcactttggggggccgaggcgggttgatcacttgaggtcaggagttcaaaaccagcctggccaacgtggtgaaaccctgcctctactaaaaatacaaaaaaattagctgggtgtggtggcacacgcctgtaatcccagctactcaggaggctgaggcaggagaatcatttgggcctgggaggctgaggttgtagtgaactgatattgcaccactgcactccagcctgggcaaccaagcgagactctgtctcaaaacaaaacaaaacaaaaaatagtgtcccatggaaaatgagcttcacacaaccaaagataacaagacattcaagaaaacaaggcaccagaatgaggaatcacaggaaacaagagacagcagaaaaaaagccataacaattttagatacttaagttattggacactgattataaaaattcttcgcatattatgggctttttttagatttagccttttcttttgcatattatacttaaagaaatgtaagacatgcttgaaaatacctatagaacaattctcaagtgggggcgtttctaccctccatgggacatttcgtttggcaatgtctgagccatttttggctgccacaactggggaggggctgctactggcatttagtagggtgagaggccagggatgctctaagtatcttagcacagggtggtagctcacggccaagaattacctagcccaaaatgtcaattgtgccaaggttgagaaatcctgctgtaggaaaacaatactgcaaaagatgaagcaggattaaaaaagatcagacagcttgtaggaagaaaacaattctaatacttggaattaaagacatagtgggcgtggttaatagcagattagacatagctaaagaggcaactggtaagctggtgagagacaggtaccattattctcctcatttgacaaataagtaaactgaggcacacagagagccagcatcttggtttgctgggaaataaatcacaaattggcatccacctaactcaagatctgtgctgttatccactctgccattctgtttaaacccaagggaatggtgtcctctctctgcctgagcctctgaatgtcttccccatttgctattttctttggcaaaatattttagggaaaatagaatttgtctaaaaatgcctgacagaagaaaggcacattgtgttgcattagcatgcaggcaacaatgcctagcggggaaaaatggcacagcaatttccgtctctaaaacatttaccttccattaactaattatggcccacagttcatagtcaaggggcttgggggtgtttatctttacacagacacagggaaaatggaagaaatgcaccgataaaagtggtcccccccagggcatgcgtggtggctcaggcctgtattcctagcactttggggggccgagatgggcggatcacctgaggtcaggagttcgagaccagcctgaccaacatggagaaaccccgtctctactaaaaaaaattaaattagccaggcgtggtggcatatgcctgtaatctcagctactcaggaggctgaggcaggagaatcacttgaacccaggaggcggaggttgcagtgagccgagatcatgccattgcattccaggctgggcaagaagagcgaaactccatctcaaaataaataaataaataaataaataaataaataaataaataaagagttccccctatgagctgctagaagctggaatgcagggtccagggccgtcccaaatttgcaaccctagagtcttcagctgcaggatcttgggcaagttacttcctctctctatgctttgatctctctctctccataaaatgtggatcatgaaaaacaacccttttaggattctttccaaagatccaaggagatgtgtgttaagggcatggcacataacaactgctcagtgttactggtgattacttctattgcagaagcaggaaaacacagtggtaaaaacaaacaaacaaacaaacaaacaaacaaacatacacacacactctgggatcacactcctgggtctgaatcccagctctaccactccgtagctgtgtgacctttggacagttacttaacctctctgggcatcggtttcctcataggtaaaatgtggataataacaggttgtttttttttgtgtgtgtgacagagtttcactcttggagtgcagtggagtgatctcgactcactgcaacctccgcctcctgggttcaagcgattctcctacctcagccaagtagctgggattacaggcacctgccaccatgcctggctaatttttgtattattagcagagacagggtttcaccctgttggtcaggctattcttgaactcctgacctcaggtgatccacctgccttggcctcacgacgtgctgggattataggcgtgagccactgcgcagggcaagagctcttatcttataggctctttagaagattaaatgggttaatatttgtaaagggctcatagtaaatgctagttgttattctcatcacaatttacctggattattaggctgatgagtgcaatgcagttgaactgaagttttacaagggcagaaagcaggcctgtcttgttgaccgatgtgtcatcagggcctagcacatagtagaacctcagtgagcaattttggaatgaatgaagtatttcctttttacctgccaatatccccaaatgtaacaaaaaccatgactaccatttgctgagaatctaccctggagcaggccccctagtgggcatattacacggatcatctcctcgcatcctcaaaacaacgctgagacaggtggcatcgttccatttcacagataaggaaaccgcaggtcagagtggccccgcagcctgtgaagggaaaagccagaattttcgccacgtccactgggattcccaaatccaaatgttcagctactttctgccaccagtgtttccttcaacctgcgatccgctctcatggatgtcacagccaatcacgtagaccccgagagccctcatgtttgtatttctttgcttctaccatatgttccccctgcttcttactgaagaatagaagcagttcaatgcctcagtttccctactcataaaaggaggaaaacaacagtggtgttctcagaatggccttgaggacggcacaggtgaatcacgcctcaaacagagagagcctctgcaaatggaatagcctctctaccacttgcctatgaatccccccaccaccttgaccctcgggcacacatctttagatttgctgaccaccttctgagctgggtctcgctcctctgcccattagctttctttgcccaagctgatttatctgtcatttctccccctccagcctctatcactgtgcgtacacacacacacacacacacacacacacacacacacacacccctctttctctctcttcttgcagcctcttcagccactaaaattagctccatctctagtccacatccccagcacgcctgtcctggtttctctgggctcccagccacttgcgatattgtgtctcagatgccacacgctgcctgcctgatgtcacagccgcttcctaaaacaagaggtattttgagatcttggagggggtgggagcggggggaagggagggatttcacacatcttcctcccggggtgtttttaaaaaacgctgacacgagagatgtgtgcccccctcactgtgcccctcactcctatttttagtttcaaagcgtccaaaaaaaaaaaaaaaaaaaagcttcagagccaatgagacctctaagggccccagtgggtcaaatcttgatttaaaaaaaattccacttctgggtctatatccaaaagaattgaaagcagggactcagctatttgtacacacaggtttacagcagcattatttacaatagccaaaaggtggaagccaagtgcccatctggatgaacagataagcaaagtgtggtccatccacacaatggaatacgattcggcctggaaaagaaggaaattctgactcatgctacaatatggatgagactggaggacattatgctccacgaaacaaaccagtcacaaaaagacaaatactgtatgattctactcacaggggggacccaaagtagccaaattcacagagatagaaactagaacggcgggtgccaggggctgggggagtggggagtgtggagtagggtggggggagtggggaggggggaagggggagtcggggagaggggaagggggagcggggagtgagagtttcctgggggcagagcttcagttttgcaagatgcaaaagttctggagatggatggcggtcctggttgcacaacaatatgaatgtacttaacgccgctcaactaaacacttaaaaaatggtacattttatgttatgcatatgttaccacaatgaaatatatatatatattttttgagacagagtttcgctcttgtggcccaggctggattgcaatggcatgatctcagctcactgcaacctccacctcccgggttcaagcgattctcctgcctcagcctctcgagtagctaggactacaggcgtgcaatgccacgcccagctaatttttgtatttttagtagagacagggtttcatcatgttggccaggctggtctcaaactcctgaactcaggtatctgcccgcctcggcctccccaagtgctgggattacaggcgtgagccaccattagaacaatgagacaagcaggtcaggaggagatagcacatggacagggggtgaggatgttaccacctagtcatggcaggggcttgatgcccctggaagattttactggcacaattcatattacaaattatttagtgaatacttactatgtgccaggctgtgttctaggctctgggggaatagcagtgaacaaaacagacagaagtccctgccctcatggagctggcattctagtgggggcaggggattggcaataaccaataaacaagtaaatatagcttggcagatgctcttcaggggtgtagagggaaattaagcctagaggcggggagtggggtggcacagtgcaggtgaggcagttacatgttagaaggacacttgagcaaagacccaaaggaagtgaggggggagccaagcagatatctgggggaagagtgttccaggcagagggaacagcctgtgcaaaggccctgaggctggggagtgcttggtgtgtaagggacagcagggaacttgtgtagctgaagccgagtgagtggagaggagagtgggaatagagggggatgggggatcacaggggcagagtttgtgggtccctgtgaggagaatttgggctttttctccaagtgaggttgtgagcaaagaggagccaggtcctgactcagtggctcacaggtgccctctggctgctgtgtggggaacagtcctgggggtggggcaaggactgaagttaagagaccagattggggtggaggggcaactggtttagtccaggccagcaaagatgggggctggaccggggtggggctgtgaaggtggtgagaggtgggtggtggattctgggtagattctgaaggtagagccaataagatgtgctaacagattggatgcagggggtggagaaaaagaggcatagaggcatagaggaagatctggaggtctgaggccagagcactgcagggggttaaagccgcctttacctaaacagaaaatagggcaggaggagcaggtttgggtgacggtggtcttttggaggagctgtaatccctctaacacctcagagtcagctgcacacccatgttcatgacagcactcttcacaatagccaagatgcaggtacaacccaaatgtccatcagtaaaggaatggatgaagaaaatatggcgtgtatatgtacacaatgaagtactattcagtctttaaaaaggagcaaattccatcttttgcgacaacgtgcatgaacctggaggacattatactaagatgaaacaagccagacacagaaacgcaaatagtacacaatctcgcttatatgtgagctctaaaaaatttgaggccgggcgtggtggcccataatcccatcactttggaagcccgaggcaggcagatcacgagatcaagagattgacaccatcctggccaacatggtgaaaccctgtccctactaaaaatacaaaaattagctgggcgtggtggtgcacacctctagtcccagctactcaggaggctgaggcaggagaatcgcttgaacccgggaggctgaggttgcagtgggctgagatcatgccactgcactccagcctagcaagagagtgagactccgtctcaaaaaaaaaaaaaaaaaaaaaaattttaggccaggtgcagtggctcaacgcttgtaatctcagcactttgggaggccgaggtgggtggatcactggaggtcaggagttccagaccagcctagccaacatggtgaaaccccgtctctactaaaaatacaaaaattagccgggcctggtggcaagcacctgtaaccccagctactcgggaggctgaggctggagaatcgcttgaacccaggaggcggaggttgcagtgagccaagatggcaccattgcactccagactgggtgacagagcgagactccatctcaaaaataaataaataaataaataaataaataaataaaaattaaaaatttcaaaaaataaaaaatttgaacccatggaagcagagagaatggtggttaccaggggctggtggtggagggattggggagatattaggcaaaggatacaaagtttcagtcagacaggaggaatacgttttagagatcttttgcacagcatggtgaccacaattaatgataacgtattgtagtgtatgtttcaacgtactatacaacataatgtaatatacaacataaggtattgtatatttcaaaattgctaaaagagtagattttaagcgttctcaccacaaaaaataagtatgcgatgtagtggatatgttaattggcttgatttaatcattcaaaaatgtaaacatatatcagaacatcccattgtactccatgaatatatataattaatttttcagttagaaaaaaagtcaggctgggtgcagtggctcatgtctgtaatcctagcactttgggaggctgaggcaggaagactttttgaggccaggagtttgagaccagcttgggcaacatagcaagaccccgcctttataaaaaaacttaaaaattagccaggcatctggctcatgcctgtaatcccagcgctttgggaggctgaggtgggcggatcacgaagtcaggagatggagaccatcctggctaacacggtgaaaccccgtctctactaaaaatacaaaaaattagccaggcgaggtagcaggcacctgtaatcccagctactcgagaggctgaggcaggagaatggcatgaacctgggagatggggcttgcagtgagccgagattgcgccactgcactccagcctgggctacagtgcgagactctgtctcaaaaaaaaaaaaaaaaaaattacccaggcatcatggcgtgtgcccatagtcctagctactcaggaggctgacgtgggaggattgcttgagcctgggaggtcaaggctgcaataagccatgatcacaccactgcactccagcctcggcaacaaagcaagacgctgtctcaaaaaaaaaaaaaaaaaaaaaaagtcagctgaagaagatggacccccagggacatggaaactggtttgcacccagagccttggatcagggcctgcattgtggggaagtgaccttggtctggctggtaggcgggggatgcaggtcagattattgacctgggctttggtgtctcatctgctaataagggatgcaaaaagccccaacctcagaatctctgggaggcaccaatgggagaattcttgcaaagggctcagacagcccttccctgcatagcacccagcagaacaagagcaagtataagtattagcaatggaatggttgcagtgtgtctagctaacctctcctgggcaacactgcatcatccagtggccatcccctgggaactaagtcaagcagcaaacgtctggaaacagggtctttactttccagaatcagataatcacagaatcagcaacctctactccatgtattgagtgtggcagttaagagcttcgacactgaagtcaagcttcctcatttaaaccccaattccaccacttcctagccgtgtggcttggggcaagtcctctagcttttctgaacgtcagttttctcatctgtaaaatggggagattgagagtgaatgaaataatccctgcaaagccctaagggcacagcctggccacacacatgttatatctgtgttcactattgttgttgttattattatttttagagataagttttcgccctgtcacccagggtgcagtgcagtggcgtgatcatagctcactgcagcctcgacctcctgggttcaagtgatcctcctgtctcggcctcctgaatagctgggactacaggctactgttattactgataccttcatttgtcctgtgaaataggtacaatgagcccctgagatattaggttggtgcaaaagtaattgtggtttttgccattacttttaatgtactttggatctgtgtctgtccgcaaccaaatcttatggcgaattgtaatccccaatgttggaggtggggcctggtggaaggtaattggatcatgggggcagatttccgccttggtgctattctcgagatcgtgagtgagttcttgtgagattggacatttaaaggtgtgtagcatctccccactctctctcttcctcctgttctggccatgtgaggacacctgctccagctttaccttctgccatgattgtaagtttcctgaggccttcccagaagctgagcagatgctgccatgctttctgtagagcctgcagaatcgtgagtcaattaaacctcttttctttataaattaccccagtctcagggtttttatttatttattattattattattatttttacaaggtctcactctgtcgcccaggctggagtgcagtggcataatcattgctcactgcagccttgacctcccaggcttaagcaatcctcccacctcaccctcctgagtagctgggaccacaggcgcgtgccaccacacctggctaatttttgtacttttagtagagacaggatttcactgtgttgcccaggctggtctggaactcctgggctcaagcaatcttcccaccttggcctcccaaagtactgggattatgggtgtgagccactgtgcccagccaggcatttttttttttaattttttaaaaataatttgttttttgagatggagtctcactctgtctcccaggctggagtgcagtggcgcaatcttggctcactgcaacctctgcctcctgggttcaagcaattctcctgcctcagcctcctgggtagctggaattacaggtgcatatcaccatgcctggctaatttttttttttttttagaagagatggggtcttgctatattgcccaagctggtctcacactcccaatctgcccaactcagcctcccaaagtgctgggattacaagcataagccatcacgcccagccccagccaagcatctcgttatagcaatgtgagaacgggctaatacaggccccaattttcagatggggaaactgaggctcagagagacaacagtcttgccagaggtcagcagagcagcagaggtgagcaggaagggtgctctgccagcctgtcctcattttcccagatgtacactggggacaatgacggcacctaccaagaaagatgtgcctggaggattaaatgagataatttactcaagatattgagaatagcactaggtacaaattgtggatgaatgttggtgtttatcataactccctcgggtcactcggctgggcactggagaagcccatgactgtctgactgcagggtccagctccttattacagagctttgctgctgaacctacaatttaaaaacacacaaggctttacttgtttttgttttgttttgttttaagatggagtctcactctgtcatccaggctggagtgcagtggcgcagactcagctcactgcaacctccacctccccagttcaggtgattctcatgcctcagcctcccgagtagctgagattacagggatgcaccaccaaacccagctaatttttgtatttttagtagagatgggatttcatgatgttggctacgctggtcttgaactcctgacctcaagtgattcaccagcctcggcctcctaaagtgttgggattacaggtgtgagccaccgtgcctggcctgcctttgcctgtttcttcagaaaggacaagggaatgaaaaatcagggattgttccctgagccttcgctttttcgaagcactcagcattcctggtgcccaaggcttcccacattgtccccttggctggtacagctgctgaggcgagtgtgattctgaggttggggctttttgaattccctgtttgcaaataagagaggaacctcagctgctcctgaatccacccagagcaggctgggcagtccctgtttttctcctcctgctacagaacaacaggactggaattaagtatagctcttcttccttctgtccatcccctagcaatgtctgggcaagcctaacaaaagccatgaagcctgtattatcagctatgaattcattcattaattcactcattcattcattcactcactcattcattcactcattcattcatccactcactcattcattcactcattcattcattcactcaatcacccatttatgcattcaacagatttttactgaaccccattctcaagttctacacgaggctctgtggttctgtctttaccccccagaggaaggagacagatgattaaccaaatagacaacattaagaggattcacactgatgccacagatggccataaagaggggacctaaactggtatcatagtgggcatgcagtggggagatcagggaaggcttccttcctggaggaagagacagtatcatatcagtaaacatgtacttccttgaggcctgagagtgcccctttggcaccttggcccctcttcaaggcccctggactgcccccacaatgcagcaaacaatgagtacacatgtggcacaacaggggaacctcttttcaggttagctggtgtccctgccacctggatgttaaatactttatgtatcatgtctgggtaagaattaagcagatacagaggagggagcatatctcagacacaggcacacagcatgtgcaaagtccctggggtgagtgggcagaagctgctcgtggagaaggctggtgtccctttccctattttctccctctaaaatttgacagtggacagaaggaagcctggttctacagtggggcagagctgtgtccaaatcctggctctagccacacagaactgtgagaaggtttgaagatgataagctatgtaaaggatctaagacccagcagatgctcagttcatgctctctgaagttgatctctacgccggcctcggtttccataaacctaacactgcagaagggaagagaggtggaggcagctaagaaaagaaaagggccaggtgtggtggctcacgcctctaatcccagcattttgggaggctgaggagggtggatcacctgaggtcaggagttcaagaccagcctggccaacatggcgaaaccctgtctctactaaaaatacaaaaattagccaggtatggtggcgtgctcctgtaatcccagctactcaggaggctgaggtgggagaattgcttgaacccaggaggcagaagttgcagtgagccaagatcacgccactgcactccagcctgggcaacaagagtgaaaccccatctcaaaaaaaaaaaaaaaaaaaaaaagaaacaaaaagagttggggcgggagggagaagagttaaggtctccacatagacacccaaccagcctggcctctgcccccacctgagcccctgagccaatggaatcagagccaggtttccatccagctctgatcaggagtgggtaacatttcaacaaacaaaatccaaagccccagtggacagagggagccaggttgcgtgtctgtgcatgtcagcatggcagacaagaaatctcttcccttgcacgccaaccacctgtgagggttcagaactcagatatcacagtgagatttgataaaagctggaagcatctgaggaggctgtgtaatcattcccacttttctttccagcttgctgtatgatgggccctctgctctcagcagagtttttgctgacattttttcctccttttctctgtgcaagtgacacagtaatgacacgtcatctacattgattgctgagggtcagggatggaaaggaatctgaaaatatgctctgagggcccacagaagtcagggcaaaaggccccagggaacaggaatggggccccagtggccccaggtaaataccagatgggctctgttgccccattccttgaatctggaccagcttcattgcttgctttggacaacagtggccaacacgatgttgtgccattcctgggactagcccttaagaaggctgaacacttcctctttctcttagaatcccattgctgccacgtgaactagctcaggctagcctgctggaggatgaaaagctgccatgtgaactagctcaggctagcctgctggagggtgaaagaccatagggagtggagcacagtcattccagccgaggtcatcctggaccagtctgcagccagctaacagccaaacagaagagccacccagctgacccgcagctgaccaaagatgcatgaatgagctcaactgagaccagataaagcacccaactgggcccagcctaaactgccacccttcagaatcatgagctaaataaatgcttgtcattataagccactgggtcttggggattgtttgttacacagccgtattatggcaatatataactgatgcaaaggagcatacagaagaggtaaatatgagttacactaagacagagttttaaaataaaatatcctgattttattttattttgattataggtgcacgccaccacacccgactaatttttatatttttagcagagacgggatttcaccatgttggccaggctggtctcaaactcctgacctcaggtgatccacctgccttggcctcccaaagtgctgagattacaggagtgagccaccatgcccagctttctctttcttttctgactatcctgttcccctgtttcctggtattgccaaacaaaccacttgtcctcaaattttttttttttttttttgagatggagtcttgctctgtcacccaggctggagtgcagtggtgcgatcttggcttattgcaagctccgcctcccaggttcacgccattctccttcctcagcctcccgagtagctgggactacaggcgcccaccaccacgctcagctaatttgttgtatttttaataaagacggggtttcaccatgttagccaggatggtctcgatttcctgacctcgtgattcgttgccctcaaatctttgtctcaggatcagtctgggttctgggttcttcttttttctttttttttttttgacggagtctcgttctgtcgcccaggctggagtgcagtggtgccatctcagctcactgcaagctccgcctcccgggttcacgccattctcctgcctcagcctccccagtagctgggactacaggtgaccgccatcatgcctggctaatttttttttttttgttttgtatttttagtagagacggggtttcaccacgttagccaggatggtctcgatctcctgatctcatgatctgcccgcctcggcctcccaaagtgctgggattacaggcgtgggccaccgtgcctggcccagtctgggttcttgattgcaaaaccaaacactgaccggctatcttaggcataaaagggatttttaggaaactcagataatcaacagggggccagaagaggggatttgggaaatcagcaggaacaatgtagccagcctgaccttctcctgtagcaggaggccatgaaagagtccaaaccatcatgtttggatcacttggtccattttcaaattcctgggtaggaaaacgtgactggttgagttttttattagtttgttttttgagacaggatcttgccctgttgcccaggctgggctggagtgtagtggcactatcacggctcactgcagccttgacctcctgggctcaagcaatcctcctgcctcagcctcctgagtagcggggactacaagcctgtgctaccacccccagctaattaaaaaatttttaagagataggggtctcactatgttgcccagtctggtctcaaactcctgggcttggctcaagctatcctcctgccttggcgtcccaaagtgctgggattacaggcgtgagccactgcgcctggccctggttgtttaaatcacatgccctgactaccaggtgatggggtgacaatgaatccctttcaccttcaacttattagtgagggtgggatcccatagaccagcagtactttatagaaaggggaggattctccctaaattggaaagggaggtcagatattgggaacccaactaataatagcaaacgttccctacagttaactaactggtctatggaactgggcctggggaagtagtaataattattatcatcattataatgatagttattagtcttacaatagctaatataattgagcacttattctgtgccagtttttgttctgaatgccttatatgtatctcactgacttttaccttttgaggtaggtgcaattattattcccattccacagatgaggaagctgaggcccaatggactatatcactttctctttcttcagactgtccctgggcaagtaacatccataaacccagcccagcatgggtcagacattaactcattgaaccttgaaaacaactccataaggtggtagtattttgttgttgttttgtgttttgttttgtttgtttgagacaaggtctcgctctgttggactgcagtggtgcaagcacggctcactgcagacttgacctcctgggctcaagtgattctcccacctcagcctcctgagtagctggaattacaggcacacactatcacacccagataatttttgctttgttttgtttttgtagagatggagtttcaccatgttgcccagaatggccttgaactcccaagtttaagcgattcacccaccttggcttcccaaagtgtttggattacaagcatcagccaccatgccccaccaagtcaggggatgctactactctcattttccagatgaagaaatggaagattcagggaggtacagtaacttgcccaaggtcacacagcttggaaacagtggagtcaggttgggaatccactctaaccccaaagaccaggtcttaaccactatgcttccttacgtgtctatgtagactggctgtcctcatttagagatgcctgcacaagaagcagctgggttgcaaagcaatgtttaaaaaaaattattttttgagacagagtcctattctgttggccaggcatggtggctcacagctgcaatcccagcactttgagaggccaaggcgagtggatcacctgaggggagaagttcgagatcagcctggccaacatggtgaaaccccctctctactaaaaatgcaaaaattagccaggcatggtggtgtgcgcctgtaatcccagctacttgggaggctgaggtgggagtgcttgaacctgggaggcggaggctgcagtgagccaagatcgcgccactgcactccagcctgggcaacagagcaagaccctgtctcgaggaaaaaaaaaaaaaaaaaagagtctcggtttgttgcgagtccagtggcatgatcttggtctcccggcttcaagcggcccaccaggcagccacctccctgccctggtgagaggagaggagtcattaggcatgcaaactgtagaggcagtgggacagatgccccttggaggcaggctggcatttgtcatagcaattcgagaaaacaagacctcagtcggcccccaaacctgcggagagatggatggcaaggtcttctccagccccacagggaaaatggccaagaagctcagtatggaacaaggtcacctggccatctggcctttactcagtccctctccaccccagctggaggcagagggagggaagagaacattttagcacaatacggtgtgctgggagctgtccagggtgctgaaacctgtaacccgctaagcttccaacttccgctccttgagttagcgccgagtagaccccaaggcaaaaactagggtccaatggttaatttgggaggtaatgcaaggaattacaagtgaggaatgaggaagagagagattggtaaagggtacactagtgaatgggttttatgtgaacaactaggattcaattttactgaggcacctctatgatgctgtataacatatttcagtgttttcccactgagcaatggggaagccagggtatttatacactgactccctagctcactggttgagggatgctaccgaggttgttaagcatctggctcagcaaactctgtgatgccagagactgccctccaacagagatgtagagagatgggagtgtaccaagaggaagctgcaggtgaacttagacgtaagctaggtaaataaggcatggagaatttgtagcatctatcacatgctcccccacaagaatttaagtttttttccttcagttcaccaactttcgtgtgtgatgcaaaccctaggagctaggcactagttttactccctttttccaggtgagaaaactgaggttcagtgagttcaacccacattctcactgtcatagagggaggagcttcctctgactctgaagtccaggtcttaaccatggcgctaggccaatctctcatttcttgaaatctcttctgctcctgttttcccccagccatagtggaacccaagatcagggaggggaaggaaggatcaccctgacttcccatgtcagagagctctattcaaattctcaagtttattttccttggcaaacttgaccttagagaaatagcgtaggattcaagaaaatgggttctagatccagatctgccttagttcaaatcctgggtccaccacttatgagacagatgctctggcttgaatatttcaaaccttccaaaactcatgttgaaatttgttttatttattttatattattatttattgacacggggtctcaccctgtcacccagcctggagtgcaatagtgtgtgtgcattatagctcatgcagccttgatcttaaactttccagtctccataactgtaagaaataaattgctttttctttataaattactcagtttcaggtgttctgctataagcaacagaaaacagactaagacagtaagcatttaatgtctttgagcctcagttgctccatctgtaaatgggaataataatagtatttatttaaccttgagagttgaaataattttatttttatttttatttttagagacagtcttgctctgtcacccaggctggagtgcagtggtgtgatcatagttcactgcagcctcaaattcctgggctcaagcaatcctcctgcctcagcctcctcattagctgggactataggcatgtaccaacatacctggccaactgaaaaaataaactttttacagagacaggatcttgctatgctgctcaggctggtctcgaactcctgggctcaagtgatcctcctgacttggcctcctaaagtgctgagattataggtgggtgcctatgtatgtatataatatatagtatatcatattgtaagcacctcataagtttcagcttatcaatgttgccactgttgttaataacaggcattacattcctaaggacactgggttgaatacagctctttgctgaacttaacacaggcccagtattattctaggtttagagaagtgtcctagcagagaggctgagatcctgatccaccccttaccagctgtgtgactcccttgtgagcagcttaacctctctgagcctcagattcatctgtacaaaggctagcgaggctcaatgtgataatacacataaaactcttaatgtagtccctggcacatagtaagtactcaataaatgataagaataacgaccatggcagctaacatcattattatcactgtcactgctggtgttgttagaagatggaagaaaatagctcctgctgctaggaagtgatgtggttcctggtgaaacatggtccagcaaatatcatgacaaccaaaagctttgaacaataaaaagatcgatgctctctcaatggtataactcactgagaatgacaaaaagcatttgtgtcacagtggggaatccttttggtaccaaggatgactgatccatggaggggagaaactactgcagagagacattaaaataaaatgctgctggtatttataggaactgttgctggtctcatgagttagaatgctggttgtgttttgttgttgttgttggaatgctgtttacatgtgaaggcaactaagagcaggtgcatggggcaggggtgaagaaagaaaggaggtaagaagcaactacatgtatttattcaattaatcaaaaaggagagaggacatgagaggtgtatggtcaagacactgacccctctgagacttggtttcctcaactatataataaaaagcgaggaactgggattattctctgaggatccctttcttattctctggaaagaggccataggctagtcagggggcaagaggaaggaagagagagctgggctctagtggcagaacctgaggggtgatattaaacatttataccacttccattgcccaaaaagccagggttcctggctccatgacttgaagacaccttcttattctagatctcttgccaccatctctgtgtgactttggacaaaccacttgtttgtgagtaaaacagaagggctggacctgccagaatccatggagccttaaaatccaatgatgcggcccggtgcggtggctcacgcttgtaatctcagcactttgggagacagaggtgggcggaccacctgagggcaggacttggagactagcctgaccaacatggagaaacctcgtctctactaaacatacaaaaaaattacccgggcttggtggtacatgcctgtaatcccagctactcagaaggctgaggcaggagaatcacttgaacctgggaggcggaggttgcagtgagccgagatcatgccattgcactctagcctgggcaacaagagaaaaactccgtctcaaaaaaaaaaaaaaaaattcaatgatgcttcaagaccaaaaaacaacatctttccctgatggttcctgtgtagttgtgtcttttccttgcctctgatcttcaacaaaatggcccaaagcctgagacagtttatagacccttctaaaaaggaaccttccgtttcatagagtcataaaatgtcagagctggcaaagacccagagcttctctgtcttatatctcatctgatgttcagggcatctgccatagacttctggactatctgactatttctatcagtgtgttggtcccatcttctaaacagcttagtaaatttcccaggacactcattatcagaagtgttacccttttccggcttaacaaccatttattttactgagcatttattatgtgaaagggacagtgctaaccctgtgaataaaaaagaaaaaaaattgtgctcacccctctctggtgaggttcacagtctcttttcttaacatgcacgatttgtgttatttgatctcttcaatatttatatatatttgagaatgacagtaaaagaactgtcatctcagacatacagccaagcttctgaaatcttcctcttacacattttcagtttcatgatcagaacacaaatacaataaaaacatgccttacaagggtttgacaacattataaagttaggatttctctgaggctctgagttacaaagaacaaacagatgtccggggtaagatcttttccaccaaacttcacccaagaagaaggtaaacaccgtggtggtccacacaaaatgaatcacgttttaacgctgtggtttgcttcaggaatctgagagggcaacaggttaatcagaaagtactcattaggccgggcacggtggctcatgcctgtaatcccagcactttgggaggccgaggtgggcagatcacctgaggtccggagttcgagaccagtctggctgatagtgtgaaaccccgtctctactaaaaatacaaaaattagccaggcacagcagtgcatgcctgtagtcccagctactcaggaggctgaggcaggagaactgctggaacccaggaggtggaggctacagtgagccaaaatcccaccactgcactctgtcccgaaaaaaaaaaaaaaaaaaaggaaagaaagtactcattaaagtcatcactgtctcaatgtcaaattaatatatttgagtcccctcctctctgaaacatagaattaagtgtctactgtgtttctctaccattgacattggcagaaggctaggtctgcatgatgtgtgtgtgtgtgcgcgcgtgttttttctttctttttttttttttttttgagacagagtctcactctgtcatccaggatggagtgcagtggcacaatctcagctcactgcaacctctgcctcctggattcaagtgattctgctgcctcagcctcccaaataactgggattaccagtgcacaccacaccaccatgccaggcttttttttttttttttttgtatttttagtacagatggggtttcaccacgttggccaggctggtctggaactcctgacttcaagcgatctgcccgcctctgcctcccaaagtgctgggattacaggtatgagccacagagcccagctgggattttttttttttttaagacaaaatctcactttgttgcccaggctggccttaaacccttgggctcagggaatcctcccacctcagcttccagtagctggaattccaggtgcttgcccgctgcacccagctcatgcagaatgttttactttcccctccctgttcctagcttacaacccaacaggacactaaacagcaccttggaatttggagtaataaaatttgagcaatgtgcctcatttgaaggagatagaaccaccagacaaaaaggataactgactaccagagaaataagagcaagaaaagcaagtgaaagaaatgcatggagaattcaacaagaaaggagaaggggatgtgaaaggaacccaatctagaatagaaggtcttcatgataggatcaggattccctgagaatctaataaaaactacagaccagaaaaaaaaatatacatatacacaattttcttcttgcataaaatttcagtgggttcattcatcccaacgatgagctctcacccttaggacctatctgttctagatgaagtatttctcctctagaggaatgagtctagaatctcttccatcagatgacaggaaactagaagaaaggccaccttgttgtaagcagggagatacaaacacaagtgacaaactgacctactgaatgactgccttcagtttaatgatcacttattgggacccactaggtgtctgtattagtcaaggttcttcagagggacaaaactaacaggatagatgtatatatgaaagggagtttataaggagaattgactcacacaatcacaaggtaaagtcccacgatagcccatctgaaggatgaagagcaaggaagccagtggtggatccgtcagagtcctcaaacctcaaaagtagggaagctgacagtgcagccttcagtctgtggccaaaggcctgagagctcctggctaaccattggtgtaagtccatgagtccaaaagctgaagaacttggaatctgattttagagggcaggaagcattcagcacaggacaaagatgaaggccagaagactcagcaagtctactctttccaacttcttctgcctgcttttattctggccacactggcagctgattagatggtgcccacacagattgggggtgagtctgcctctcctagttcaccggctcaaatgttaatctcctttggcaacaccctcacagacacacccaggaacaagactttgcatccttcaagctgatcaagttgatgctcaatattaaccatcacactgctcaataatatatgagcttccctaagtgttcccataaccgtgttattatgaaaaaaaaaaaaaaacagggctgcaaaagcccatcaatgatagactggataaagaaaatgtggtacatatacaccatggaatactatgcagccaagaaaaagaacaagatcatgtcctttgcaggaacacggacggagctggaggccattatccttagcaaactaatgcagaaacagaaaaccaaatactgcgtgttctaagtgggggctaaatgatgataacacatggacatacagaggtgaacaacacgcactggggccttttggagggtggagggcgggaggaggaagatgatcaagaaaaataactaatgggtactaggcttaatacgtgggtgatgaaataacctgtacaacaaacccccaagacacaagtttacccatgtaatagatctgcacttgtacccctaaacttaaaataaaagtaaaacaaaaaaaaccacacagggatttttaaggctccttcctgccagcaaggtcaagccagcctcagccagcagaagccagcccccagggagcatgaattggcacaaccactttgcagagcaatttggcaatacctagtggggctgaggatgcacacagtatacaactcagcagttccactcctgggtacgtgccctagagaaactcacttgggagaaagcagggacactttgggtcaaaatagcccaaagctggaaacaatccaaatagataaatacacggcagcatactcctaccacagaatactatgcagtcatgaaaatggatgcatggaaactatttttattaatcagatttatctcatgttgaacacaaaagtcaggttagagaaatgtgaagtttgaaaaacagtaccacatatctctttttttctttctcttttcttttttttattttttattttattttatttttttgagacaaggtcttactttgttgcccagcctggagtgcagtggtgcaatcacggatcactgcagcctcgacctcctgggctcacgtgatcctcccacctcagcctcctgagtagctgggactacaggcgtgcgtcatcatgcctggctaattttttgcattttttttatagatggggtttcaccatgttgcccaggctggtcttaaactcctggactcaagcagtcttcctgccctggcctctcaaagtgctaggcttacaagtgtgagccatcacacctggcctttattaaaaaaacaaaaaaacaaaaaacaacaacaacaacaaaaaacattttttagggacagggtcttgctctgttgcccaagctggagtgcagtcatagctcactacagcgtcgaccttatgggcttaagtgatcctcccgccttggcctcctgagtagctgggaccacaggagcacaccaccatgcccagctgaatattttattacattttatttcattttgtagagacagggtttcactacattggccaggctggtctcaaacttctggcctaaagtaatccttccatctttgcctccaaaattgctaggattacaggtgtgagccaccattcccagcccacatatttcttatctatgcatgtagtcaaagtgtaaactattctcactctgatgctatttaaaaaatattttgaagtgtaaaaataggtagcatatatttcttatatacttaggcagccaaagtgtgaatacataaatgcaaataataaacataaaattcaggaaagtgcccctggatgggggagagaaaggaatgggtctagggagggagaaaacagggattagaaaggttagaaaggttttgttttgctgggcacagtggcttacgcctgtaatcccagcactttgggaggccatgccaggtggatcacttgaggtcaggagttcaagaccagcctggccaacatggcgtaaacccgtctctactaaaaatacaaaaattagctagatgttgtggtacacgcctgtaatccaagctacttgggaggctgaggcaggagaatcacttgaaactgggaggcagaggctgcagtgagctgagattgtaccactgcactccagcctgggtgacagagggagactcttgtcaaaaaaaaaaaaaaaaaaaaaaagagaaaggttgtgttttgatagcaggttactccattacttctctatccccaattctccccattcttctggtcaccttctctagccatgtgggtcttcttactgttgatcaaacatgtcagatacagtccagcctcagagcctttgcactggctgttccctttgcctgacactctgttccagctctcctcatggctcactcactcacctcccttaggttttcattcagatgtcacatgcccagtgaagtcttccctggcttccagcacccctcacccctgcctgccacacatcccatccctcccctgctttatttttcctctgtacccctcaccgccatctgacacactagattcattcatcaattgtgtccatctccatcagtagactctcagctccatgaggacaggggatttttctattttgtttactgctgtgtcccagagcctagaacaggacctggcacacagaagtgttcaataaatagtcattgaataaatgaatgtatacacaggtgtttgctctattattctctacttagttttgcatgggatcttgctaggttacccaagctggtctcaaactagttaggctcaagcaatcctctctctccagcctcctgagtaattggggttacaggcatgtgccactgtacccagctttatacacttttaatttttattttgtggagatgtggtcttgctatgttgctcaggctcgtctcaaactcctgggcccaagcaatcctcccaccttggcctcccaatgtgctgggatacaggcatgagccaccctgcccagctttacattttttaaacaataaaaaagttagccactaggctgtttctagatgagtttcctagtagactaagagaaaagtgcccagtaccataatatgcccttggaacccaccaaggtcccaagccaccgaactgtgagcacagccaacaaagatccctctgtgaacacccaagcccatgagagctagcccagagtccttacaacagactgctgacatctgaaggcctctacagaaacagcccaataggccacagctccttctgtgagaggcaacattgctctgaaacaaatctgcattgtgagagcccggccagcacagtgtgggtgctgcaacccatcacatccgccaagagagacagaacctggagcagcaacaaaacatggaaagctatgatcctgtaaatgattactatgaaaaaggtgtccagtgaagaagggtcttagaatagaagagcccagacttagctgagaggagagtagagagtgggaagaggaggaaccagccattggtaccagatactaatgtccctactggaatctaataaaagtttttaaggtccctgacagactagtaggtcattctccaaatccatttcccttttcttctaagcacaatctgatacttcccagcttcccttgcagtgatgtgtggtcatgtgaccgagttctagccaataggatatgaatggaacaggtatgggtcacaccccttccaaactcataaacctttccaagtatcaccttctatgctcacttctccttcctggtttgatacagacaagcatggagttattggatgatgtgggctgacaatgaagagccacaatatggcaagggtcagggtccgtcagtcattggaggagatgagcctgtcaactaggaacaattattttggacttttttttttcgagatggggtcttgctctgttgcccaggctggagcacggttggatgatcatagctcactgtgccctccaactcctgagctcaagcaattctcccaggcatgtaccaccatgcctggttaatttttattttattttatgttttacagatgggggggtggtctcactgtgttgcccaagctggtcttgaactcctgagctcaagtgatcctcccacctcagcctcccaaagtgctgagattacaggcatgcaccaccacacccagctcaattttgaattttctatgagtgacaaataaacttctgccgtgtttaagtcatttcctagctttggatcttttgttataccagcaagtgctacctcatacagggtgcttagaggaaagcatatacacatttcaaccacagttcatcatatatggatctgaaaactccttgaagacagtaactgtaccttatttagcttgcttttctcctttgtcataatcacaatcccttgcacccagacattctcaaaaaacattcaccaagttgaaataaaagcaagatatcctcaagcaaatcaagagacccatgcacgtacaacacttaaaaccttgagttctggaatgcataatcttctgttcatctcccagttccatcacttacttgctgggtggccttaagcaagttacactctgagtttctgattcctcagtggtcagatgggaatattaatatttcctaattcagtgggttgttgcaaggattaaattagagaatgggcataaagcactctggaagcagccaacaataatgagctattattttaattgtaacagaaagcatctgctgtaatatacagctgagacatggaggtggggtgttggcagaaaggaggcaggcgcataacaaggggagggagaacacaagggctcagccttcctgagcctggcccggaccacaccaaccaaaagcctcgtaatccttcagctagttaaatccaaagcgtatagcacgcgccacttaccccgttagcaccaccacaaagtccatgacattccagccattcctcaagtaggagcctttgtggaaggcaaacccaagggcaatgattttaattccagcctcgaaacaaaaaattccaatgaagtatggttctgtgtcatcctggaagggagagaaggcaaggtcagcgtcttgggctgggcagatgttgacaagatcagggaaccagcccacctagaaatcagtacctatcaccctctcacttcccctgaccctcctgcactcaccacccctcactgcctcttgcagagttctcttgtccaaagccttttgcgagcaaagccaatgcctagagaaggcaccttcctccttcattccttttgggccaacctcacatatcactcagctaaacagaattatttgtttgcacctgtcttattcaatacgacagtcacaggccacatgtggctatttcaattaaaattaatttaaatgcaataaaataaaaaacacagttctgcagtcacactggctacatttcaagtgacaatcctattggacagggcagatggagatcatttctgtgactgcagaaagttctaatggaaagcattggtttagagaatttacttgtcacatgcagcgttcaaggtatttgaggctagagcttgtgcattgacctcactcctaaatctgaccccttaggatggttctcagctggcatgtagattgttaaaggtttggaataggacttctgtactggctgataagtggccagtatcctcacctccagttcctctgcagaacctccggctggttctggcttccagctgctaatctatcatatttgaaattaagctacaagctcttctccatcagagccccaatgtgaatgttttcccatctgttacagcaacgtttctcgagctacaatcattttcactctgcctgaatgattttttttttccacattagcttgccactggtacttctacttgcttaccagtctttcaatggacgctttttatttagctttattttaagtgaaaatgcaaagatctagaaatcataggtttgctaggctagttatagtttttagaagactgtgacattgtgaaatgtatgtttggtctttgacactgtttcctggtgtacagctcctaaaacccttgggatctccaaagggatgtctttttgcaggctaaggattgactgatggctggcagcttctaggtagcttcaggatgggggttggtcaccgggaaaaccaaggcatgattagaggtttggatttaaatcattgaccgttggtgatcaacttgattttcagcccctctgccctcccagaggttggggggtggggctgaaagtcgcaaccctcgaatcatgccttggtctttctggtgaccagtccccctcctgaagctacctagaagctgccagccacacccttctcctatatctcaccctttgcatctcttcatctgtatcctttgtaatattcttgtttcttttttttcgcctcccccccaccaagatggagtttcactcctgttgcccagactggagtgcaatggtgcgatcttggcttactgcaacctctgcctcccgggttcaagcgattctcctgcctcagcctcccaagtagctgggattacaggtgtgcaccaccatatccagctaattttgtatttttttagtagagacgggctttcaccatgttggtcaggatggtctcgaactcttgacctcaagtgatctacctgccttggcctcccaaactgctgggattacaggcatgagctacagtgtctggccaagacataattattaacattaacaatgttcatttgagtatactgcctgaaattatgtcagatgccaaagtgggcagtttgagaccagcctaagcaacctagtgagatccccatctctacaaaaaaagataaaaataagaaaattaactgggcatggtggcacctgtagtccctgctactcaggaggctgcagtgggaggatggcttgagcccaggaggtggaggctgcagtgagctatgactgaaccactgcactccagcctgggtgacagagcgagactctggttcaagaaaaaatgaaaaggaaatttaggcttcccatgatctggctctgggctccaggactgagagcctcctctgtgccctgctccactcccccaaaaattaatgtcctgctaaagccaaggagaagaccctgagaaaagacatcactcaccagccgttcagacatcggggtcttgtcatcatcaggcagatgctgctccagtgcgaggacgatgcaattcgctatgatggtggctaaaatcatatattcaaagggagtattggggaattaaggaaaaatcttgttcaaagaaaagaagggtgttggaggtgcacccacccccactgaccccagtggaaagatctcaagccctctagatccttccaactcatcagcacaggtggaattattcgttctcctgtctggagtagatccctgcagatctcaaacccagatcaggtgacttctaaagggaaatgtggatattcaccttctatctcacccacaatattcactgaacacatattcattcagtacctgctgtgtgccagactctgttctgggctagggacacagttgagagcaaagcagacaagaggagaagcttcctcctgcttcccagaggagaagcaaataaatgagatgactacatcatgtatactatgctatacagtacactgcatataccatgttatacagtacatcatatatgctatgttatgtagtaagatggtgaagactatagacagtggaaggggtcagggctgcaatttcaaatatggtggcagggccagcatgatggcaggcacctgtggtcccaggtacttgggaggctgaggcgagagaattgcttgagccgaggaggtagaggctgcagtgtacaatgactataccactgcactccagcctgggtgacagaaggaggccctgtctcaaaaaaaaaaaaaaaaaaagagataaattaaaaatagatagaggctgcggtgggtggatcacttgcggtcaggactttgagaccagcctggccaacatggtgaaaccctgtctctactaaaaatacaaaaattagccaggcgtggtggtacacacctgtagtcccagctacttgggaggccggggcaggagaatcgcttgaacctgggaggtggaggttgcagtgagccgagatcatgccactgcactctagcctgggcaacagagcaagactccatctcaaaaataaataaaataataaataaataagtaaataaataaataaaacattatgatcagatttgacacctaatgcatgatccacagaagaaaaaacagatatgctgggctttatcaaaatttaaaccttttgtgcatcaaaggacgttatcaagaaagttaaaaggcaagtaacagaataggagaagctatttgcaaatcatgtatctgataagggtctagtactatataaagaacatttacggccaggtgtggtggctcacgcctgtaatcccagaactttgggaggccaaggcgggtggatcatgaggtcaggagatcgagaccatcctggctaacacggtgaaaccctatctctactaaaaaaatacaaaaaattagccgggcgtggtagcgggcatctgtagtcccagctactcgggaggctgaggcaggagaatggcgtgaacctgggaggcggagcttgcagtgagccaagatcgtgccactgcactccagcctgggcgacagagcgagactctgtctcaaaaaaataaaaaataaagagagaacatttacaacacaacaacaaaaagataatccaattgaaaaatggacaggaggctggaatagacatttctccaaagaagacagtcaaatggccaatatgtacatgagggtattagtgatcagggaagtgcaaatcaaaccccaacgggatactgcttcacatccactaggatagctattaaaaacaaacaaacaaacagaaaacaagtgttggtgaagatgtgaagaaattgaaaccctcatgctggtgggaatataaaatggtgtagctggccagatgcggtggctcatgcctgtaatcccagcactttgggaggccgaggtaggaggattacttgagcacaggagtccgagaccagcctaggcaacaaactgagactctatctctacaaaaaatatgaaaaattagccgggcatagtggcgcaggcctgtagtgccagctacttgggaggctgaggagagaggattgcttgagccccaggaggttgaggctgcagtgaaccatgactgcaccactgcactccagcctgggcaatgggagtgagaccctgtctcaaaacaacaacaacaaaaacaacaacaacaaaaaaacaccagtgcaactgccatagaaaaccattccttggttcctcaaaaagttaatcacagagttaccatgtgacacacagtaactccactccaaggtataaacacaaaaggatcgtaagacaggtattccaacgaacactcatacacaaatattcacagcagcactattcacaacagccaaaagatggaaacaacctaaatttcaccagtgggtgaatggataaacaaaatgtggtctactcatagaatggaatagtattcagccataaaaaggaatgaagtaggccgggtgcagtggctcacgcctgtaatcccagcactttggaaggccgaggcaggcagatcacctgaggttgggagttcaagaccagcatgaccaacatggagaaaccccatctctactaaaaaaagtacaaaattagctgggtgtggtggcgcatgcctgtaatcccagctactcaggaggctgaggcaggaggattgcttgaacccgggaggcggaggttgcagtgagccaagattgtgccattgcactccagcctgggcaacaaaagcaaaactccgtttcaaaaaaaaaaaaaaaaaaggaatgaagtactgatacatgatagaacaggaatgaaccttgaaaacattatgccaagcgaaagaagcagacataaaataccccatattgtatgattccatgtatatgaaatatcccgaacaggcaaatccagagacagacagcagatttgttgttcctggggaatggcaagggaaatgggagtggctgcttaatgttttagaactagatgaaggtgacagttacacaacattgtgagtgtactaaacgcctctcccctcccctctcctttcttttcttatttatttttacttttatttttttaaagaaacacaattttgctctgtcacccaggctggagtgcagtggcatgatcatagctcaccgcagccttgaattcctaggctcaaacgatcctcctgcctcagcctcctgagtagctgggactacaggtgcacaacaccatgtgtgcctaattttttttttgtaagagacagagtcttactttgttgcccagggtggtcttgaactcctgggcgacctttcttcctcagcctcccaaagtgcggggattacaggcatgagccactgtgcccagccctaaatgtcactttaaaatggttaattgtgttatattaattttacctcaataaaaaaaaaattacagtgatcagggcagacctctgagaatctgttcttccaagacccgaggcaggggaggggtcgtccagtaagtatctctagatgccccatttgcattctctccagtttgcataggtaaactcctccctgcatcctgggaactgtcatttgggtttaggaggcctccctccctagtgtcccaccagaggatctgcagggcaggtggggagggtctatcttgttcatttcatattagctcctaacctgctgatcagctggtaaatgggaatgtccgctgtctccctgccacacccctcagaagtgtcccacgccaacaggctctgcatatggatctggcaatctctgaggaggtgtaagcgctggagaagcggctgcttgagtgaaaaagccatagggtgttggttactccggagcaggatttcccaacctcagcactaggtttaggggtggatcattctccttggtggggctgtctgggcactgcagcatgttcaacagtatccctggcctgtgtgtgctagatgccagtagcagcccctcctgtccagtgatgacaacctcaagtggtctctaaacattgctgagtgtcccctgggggcactgaaatcccgcattctgtagagagatcaattagtatgtcttggggaacttgaccatgctaaacctctcccctcctcgtagctctaacctttggaaaattaattggtttcagtctcctcttctgccctggagttaggtttggcattttggaagcaccataaaaccatcccttccaggccggagggagagtggaacctgctttccaggtgggaaaacggagtctgaaatagaaaccccctcagtaaaagtctcggaaagccaggaaaaccaggcttccttttgtcaccagcttcagcctttgcctccagctgaaagcacactctgaaaagcaaaatccgagactcagggcaatttggggagccaacaaaagccggccttgccgacgatcatctctgattggctttctgcctctgagctgacaggcattaggagcccagagaacaaagctgggctgtgttgcacaaatactccactctgcctcaccctgcagcctggaaaataagagacaatatttgtacacagagcagcaacgccaagcccttccctggtctcctctcgctatgatttgaagctgacttcgctttctctccctgccaactcagcctccttacacgcgcttctgccatcccactcctccggttccctggtctcctgcccctcaatggcagggatgtgacttcctttggaccggctctggcactgaaggttccaggaagagtcccagaagtccaccatgcagcatgcagcacttttatgggctgcaatatcagggtttcaactggccagtgttgcctggatttcagacccagggctctctgggtatggcaataaaaccttagcacgtaggcaaaaataaagaggttctactctcccaccttgcttcattttcttacttcttatcaaacacagatactcacactgcttttccaacatcatcccccctccctctgctcacccgcacccccgcaagtgtccacagacatgccccagatggacatctgcaacaatgacctcagacccttgctactcaaagtgtggtcccagaaccagcaccggttaggaatgcagccttagaccttgcatccacctgctgagtcagaacctgcatttaaaaagatcgccaggggatttgtgtgcaccgggaagtttaggaagtgctaagtgcctctatttcagggataggaggaggagctcaggtaattgcggttttgagtcatccagaaagaggtgggggttcctgtttctcctccaagctttctcctccacgttctgaccccagggggagaactgaacagccctgggtaccagccttctgctcccacttgggtaaagagcctgagaagaaaccgaagattttgatgaaataaaagcaatgttggaatgcgacaaaagcagaaaagaaaatttcagcctaatgcatgtggaagtattcaaagccttcccatggatcccatctcactcaaaagcaaaaacaaagtccttccagcaccagcaaggtgcatgacctgctcccattacctccctcccctcatctcctctattctctcccttagtcactcagctacagcaacgccggcctcccttttattccccaaactccccaggcacatttgtacccaggggcctttgtacctgctgttcattctcctggaatagtctttccccagacatccacatgactccctccctcacttcctttaggcctttactcaaaggtcacatccatcaacccccttagcctgcttatttttttctttctttagtccccgtccccagtcaagcatctgctatttttttccttctttatcttgttccctgtctctcccacgagactgcacactctatgcacgtggggattttttgtctactttgttcactgcttcatcctctgtgcccaggagagcattctctatatagtagatgctcaaaaaacaccagtggaagggcctggtgcggtggctcacacctgtaatcccagcactttgggaggccgaggcgggtggatcaccagaggtcaggagttcgagaccagcctggccaacatggtgaaaccccgtctctactaaaaatacaaaaattagctgggcatagtggcagacgcctgtaatctcagctacttgggaggctgaggcaggagaatcacctgaacccgggaagcagagtttgcagtgagccgagataacgccactgcactccagcctggacaacagaacgagactccgtctcaaaaacaaaacaaaacaaaacaaaacaaaacaaaacaaaacaaaaatcaccggtggaggaaatgaaggaaggggacatgggtcctgctgcctagaaaccccgacttcatctcaagccaagtctccatgagcatgttaaggacacaatgaaaccccctgaaatatgcaatgatgtacttggtgcccagatgaaagaaagatgggctgctgagttcttggcatggtaagagatgcctcgcccgaggcagaagccaaaggtttcactgggtagtcgagctggggggcaggcgaggctttctcagcccaacctcaagtcatgcctgatcctcccgatttagaaagcctgagttctaactcacagctgcggtgagcaatgcctctgttagctgagctgagcctttctgctccctgattggctcggagagaaagcacctgtgtcagcgggatccagaaaaatcagccatcctaggaggccaaagcggggcgggggctgaaagaagagaagcatccctgatgggaggaaaagctggcttccgaaatggctctcggaagtcaggatagcagacagccctgcaggcaggtgaggagacacagagctctatacacaatgaaattgatcaggacctgcagaggccccagagagaggctgtatgtgaccctggaaaagaccaagtttgactctgcgtagggaagaaggagggcttgcatctgagaacaggaccttgctcttcagattcagaacatgaaggaaaattctcaaagtgggcgtggctgatggttcccatcccttagcaagaccttgcagtgtccaagtaatccttgcatccctctgtggtgcccttcaccctcatctcatttcaagcctcctgtggttggtgcggaaatcaaatcaggtttgtcaactctttgtgaccttgtctccactatggggactgctgatgggtgggttctaaggaaacagatacttgtagcagttagccaggtcattgagcttgtgtgaagaagccaaacagacctcattttcatgtaagttccatgctcatcacaatcaccaggaaaaagagtagagggtaccagaaccctagatatatgggtttaagacatattccttggtccattaaacacataccccaatttcactctgcaatatgatcaactattatggggccattaacaagcacagcgaccataattacagctgccttgtttccaactgcttctttgggcagataccgtggtaagcactttgtttcagttaattccttgcaacatttctacaaggtgggttctgtggtaagcctcattttccacacaagaaaatccaggctcagagagattaaacaaattttcaaggtcacataggaggtactggcagagctggggctcacacccaggtctgcccaactccacagtctatgcctttttttgtttgtttgtttgagttagggtcttgctctgttgcccagggtgaaatacagtggcacgatcacagctcactgtagccttgacctcccaggctcaagcgatccacccacttcagcctcctgagtagctgggactataggtgcatgccaacacacctggctaacttttaacatttttgtagagatgagggtctcaccatgttgcctaggctggtcttgaactcctgggctcaagcgatcctctcaccttggcctttcaaagtgctgggattacaggtatgagccactgtgcccagcccacagtctatgcttttaagctggtggtccccaaagaccactcaggagctatcctggttagaagatagatgggtttgcctttatttaaaaaaaaaaaaaaatagaatgcaggtgcacttggggccctaaccatatggattagaccaaatgggttacacctcacccaagtcccaaccaatggccacagtttagtaaaggccaaccattgcatgctagtccacgccctcataagcccatctcaagtaggaattattcatgactatttcaacttcaaacaatccaaacagtctccagttcccagacatgggctttaaaatcttcaacacacagttctaaccaaaatgaagcctggaaaagatctctccactcgctgatcagcctaagactcttagcagggatggcatgctaacaagggcaaccctagcgctgcccgggatgttttcagcaccacggccagcggcaaagaggcacaagtttaatttcacttgcacccagggatgggaatccccggggagagaaaacaaaaccagcagcaactattaacactctctgagacatctgcaaagacctacatttcacatacagggtagaggcaaaaaagattaatcatgtcatcaggaaaatcaaatgaagagaaaattaaaaacagtatcaaataggtttgtgtgtcatttgtttttcatattatccaacaatgtccaacactttggttctgaaatgagaagtctactcagggctgctaaatcatgcttctgcttagaaaactggcaatatctgcactaaaaaatagtagtgcagaggagttgaaaggatttggggatcagacgtggccttgaccttgggcaaggcagtttccttctctgagcctcagtttcctcatatataaaaggtagaaaatagcatcaacctcataggttgtgtgagaatggaatgagctgatacacacaataatctattacagggccctgcatatagtaagtgctcaaggaatgtgagtgttttatattgtttattttggttcccatgatgactagaaaatttaatgtgggccaaatgcagaggtagatgcctatcatctcagccctttgggaggccaaggcagaggatcgcttgaggccaggagtttgaggacagcctgggcgacacagcaagatcctgtctctacaaaaatacatttaaaaataagaaaactagccaggcatgttggcacatgcctgtagtcctagctactcgagagactgaggcaagaagattgcttgaacctgggaatttgaggctgcattgagctatgatcataccatggcactccagtctgggcaacagagcaagaccctatctcttaaaataaataaatacatacatttttttaaaaaagaaaacttaatatgcttataaaaacaggatacaatttatctcattgtaatcatgcaataaatgttcattactttatgacaattgctgctaatagtaaataacttttccaattttttttttttttttttttttagagaccgagtcttgctctttcgcccaggccagactgcagtggtgctatctcggctcactgcaagctccgcctcccaggttcacgccattctcctgcctcagcctcccgagtagctgggattacaggcgcctgccaccgcgcccggctaatttttagtatttttagtagagacggggtttcaccgtgttagccagggtggtctcgatctcctgaccttgtgatctgcccaccttggcctcccaaagtgctgggattacaggcgtgagccactgcgcccggccaacttttcctatttttgcccttctaggtcttggttccttttcttttctttccttttcttttggtttcttttcttttctcttctcttctcttttctttttgagacagagtcttgctctgccacccaggctggagtgcaatggtgcaatctcggttgactgcagcctccacctcctgggtgcgagcaattctcctgcctcagcctcccgagtagctgggactacaggcgtgcagcaccatacctggctaattttttgtattttttagtagagacatggtttcaccatgttggccaggctagtcttgaactcctgacctcaagtgatctgcccacctcagcctcccaaagtactgggattacaggcatgagccaccgcgtccagccttagttccttttcttcaaggagggagggaagggacaatacctaccgtcatcatagctgaacagacctctcaaatctgaaatgtttccaagaacatactgcagtgcatgcatatgtgtggtccactcactgaatattatactcaaaataaatgttgccaaaaaaaatcttcattggacatttcatgtaaatggaattaaacacgatgttgccttttgtgtctggcttctttcactcagcatcaacttttttgttttgttttgttttgttttttgagatagggtctcactctgttgcctaggctggagtgcagtggtatgatcatggctcactgcagcctcggcctcctgggctcaatcgatcctctcgcctcagtctcctgaatagctgggactacaggcacatgtcaccacacctggctagttttttgtaaattgttttgtagagatggagttttgctatgttacccagggtggtcttgaacacctgggctcaagcgatccgcccacctcagcctcccaaagttctgggattacaggtgtaagccactgtgtccagccacatcatatttttgaggttcatctatgttgtagcaaagattagtatttcattcctttttaaggcagactaatatctgaggaaggcatatcacacttggtttatctgttcatccatggatggacttttgggatatctcatcctgttgactacctagaataggtaaatccatagagacagaatgcagatgggtggttgccagaggctggaggaaggtggtggggaggggagaaggagagagactgcttaatgggtacaaggtctcctttaggggtggtgaaaatgttctggagctagacagaggtggtagttacataacagttggagtgcagtaaatgccacagagccgttcactttaaaatggttaattttctgttatgcaaattgcacctgattttttttaaattccattttggttttgcttttttttttttctttccccttgactctctcctcagggttcccatcatgggcctttactcattgcactttaccctgggcgacacagtgaggctctgtcctttttttttttttttccttttctttttttttaagacggagtcttgcacctaacctgggtcagcacccaggctggagtgcatggagtgcagtggcacgatcttggctcactgcagcctccatttcctgggttcaagctattctcgtgcctcagcctccctggtagctgggactgcaggcacccaccaccatacctggctaatttttgcatttttagtagagttggggtttcaccatgttggccagactggtctcgaactcctgacctcaagtgatctgcccacctcaacctcccaaagtgctgggattacaggcgtgagccaccatgcccatccgagactctgtcttttaaaatactgctgctgctgctgctactttcttcaataataataataataatcatcatcatcatcatctgaccacgcatccttgtgcacttgtgagaatttttctgcagaataaattccgtgatgtgaaattgctgattttttttcctctgagccctcaaccatttagagaagcatgatatggacggttttcaagagtccttccctctctcttttaaatttccattatttatttatttatttatttatttatttatttatttgtagagatgggtctcgctatgttgcccaggctagtctcaaactcctgggctcaagctatcctcctgcctccccacctcccaaaacactgggattacaggcgtgagccactgcatccagctacagggaagttaatgttttaataaaagctggaggaggcaagggaatgagccctgtttctgtctgggagaagagtaacccaggaggggaagcagccagtacaaagaatgtgtgtgggaaaaaatttgaaagacaaacacgaaattgctagcagaggttatctctgggaggtgggatggggtaagggcttttcaccttctaaatgacacactacacattttttaagcttttaaaaaaccacacaaaacaacaagcccatattcttttcataattaaaacctttttttaaaaaaagggggatgccaggcatggtggctcacacctgtaatcccagctactggggaggctgaggcacgaggatcactcgagcccagaaggtcaaggctgcagtgagctgtgatcacttcactgcactccagcctgggtgacacagtgagaccctatcttttaaaatgataataataactatctcaccatacatccttgtgcacttgtgataattttcctgcagcataaattccaagatgtgaagttgctggatgtcagaggggatgcacactgactttttcttttctttttttttttttgtgagacagagtctcagtctgtcgcccaggctggggcgcagtggggtgatctcggctcactgcagcctctgcctcctgggttcaagtgattctcctgtctcatcctcccgagtagctgggattacaggcacctgccaccatgcccagctaatttttttatttttagtgaggatagggtttcaccacgttggccaggctagtctcgaactcctgacctcaggtgatccacccacctcggcctcccaaagtgctgagattacaggcatgagccaccatacccggcccacattagatattttctggatatttacagggctatattttacagtttttaaaaagtgagatgagtgagtgtgtgtgtgtgtgtgtgtatgtaccttctgaaattaaatccataatttaaatgtataaattcctctgggccaaaaagtttaaacatggaagaattaacatgactcatggaaaacacacaaatacacaaaagtaaaataaagatcccttgatgaaaacagaaagaaaaaacaaaacaacaagccaagttttaaacaaaaagtattaatcaatttcagactctcggggtcgggaagagagtgaggagtgaggatgcttcagtgtcagattccaaacaagaactgaagaccttctccctgtttatctttttttctaggtcagtaaagttctctagggacctctgagtggtgtgaggtctctgtctcctgattcaattttcaaccactttcccttatatgttcactctaccaagggggaatccttttcctctctggcaatagtgacatccctgttcagtggtcagtaaaatcctccatttccctggtctctctctacacagtccatctacttcatggtttaaacttaaacctggaggtcaggcgcagtggctcacacctgtaatcccagcactttgggaggccaaggtggccggatcacttcagatcaggagtttgagaccagcttggtcaacatggtgaaaccctgtctccactaaaaatacaaaagttagctgggcatggtggtgcgtgcttgtaatcccagctacttaggaggctgaggcaggaaaactgtttgaacccaggaggcggaggctgcagtgagccaagatcgtgccgctgcactccaacctgggtgacagagcaagactctgtctcaaaattaaacaaacaaataaaaaacctttaacctggaaattccctgcagaccatcaactctaagaccaaggtggggccactggcagcctcaaattagttcctaagaacaaaaggaaagctcagctctggaatatgtccaccatcatggcccccagaaaaaccagtgagaagggccccaagaaagcaagagaatcaaagaaagaccttcccaactcagataaggtggaaaaggtgcccccaagaagtcaggtgaggtgaggagggctccctcaaaagcaggtgtagccaagaaggcccccaagaaagtcagcaaagccaaggaagtcttccttaaaccagccaatgccatgaaggtccctcccagtgctgctgggctcaatgggaagtccaaagtcagaggtagcaccagcagccaagatcctgagatccacaggaaaacagaagctgggagctaagactccgacggaacctgttaacatttgatgacctccaatttccctgtggagagaccattgtccatgctggtcccctgcttccttgatcactggaggatgtccctacctcttcatcaataaccaatgtctcctccaagccactccagctatgcatgctcagaagctacaccagccacctccaaaacacctgtttccagcatccttgtcttgaaccacctcttttttttttttttttttttttttttttgagacggagtctcgccctgtcgcccaggctggagtacagcagctccgcctcccgggttcacgccattctcctgcctcaggctcctgagtagctgggactacaggcgcccgccaccacgcctggctaatttttttttttttttttgtatttttagtagagacagggtttcaccgtgttagccaggatggtctcgatcgcctgaccttgtgatccgcccgcctcggctccccaaagtgctgcgattacaggtgtgggccaccgcgcccggctgaaccacctcctctttaaccacctcccagctcactaactcccttaaatgcaaaccaacgtccatcccatcgagccctgcaacccactgaccccgccatttctcaggaccctctcctgccttgtcaaccttacataggttgattatatcgcactttcttgcctcctgtttctctcctggaaaaaatccatccctgcatgaactcaactagttgccttccccatacctgggcagtggagcattcctgaatgagatcaactatctgggctggtgacattaaattcatgatgctaaactcaaatgggcatttgagaatcccagcatcctatatcagagaagacacccgtgcatattggtataatggatgggaatgacccaatttacagaaatcaatattcttccatcattaaaacctccacccttgactgaaaattttccttcagccaccaaccaatttctctactccccttcatgaagagttgccttcacgtgttcctgccacttcctcactgcacattcttctcctaccctccccaggctggtttctagcccccatcactcaaccaaaactcttccaaagaggatcaccaaagacccccaggctgccaaatcccagggccatttttctgtgcccagattacttgaccatgcccttcttaatgttgttctagttttcctcctatcctcctggtctctacttctcaatcttccctttttgctcctctttttctatccaatctctaaatgttggtcttccctggggcttaatcctaggtaatcaccctttatctatctctatcctctttctagagcttgcatgcatttcgatgtattttgccattctcttgttgccctttctccctaaaatatccactcattgccctgtttggcatcctggtagaggcagggctgacttctgtgactgcatcatccaagccctgcaacgctgccctccaccacatcttctgccttctgggttggcttggccaacgggaggcaccagcaagagatcagagaggagggggagttggggcatttctccatttgatttcctccctgctacagtgtgtggtcttagcaatagctataccactctgtgtcttcttagagcatctcataggagtgtctatattagtctcctagggcagtcatgacaaattgccacagattgggtggcttaaaacaacagaaatttattctctcgtcatcctggaggcaaggttctgaaattagggggtttcccttcaaaggctctaggggaggatccttccttgcctcttcccgcttttggtgcctctacatgtcttttggcttgtggctgcagcactccattctctgcttctattgccacatgactttctcccctgtaccttctcatataaaagcacttaccatggaatctcgagtccactgtaatccaggatgacctcatctcaatccctgactcaatgacatctgcaaagatcctactttcaaatgaggtctcaggttctgaagttccaaatgcatctgaatttttggtggacaggattcaaaccactacagtgtccaaggcccaaactcttccattccctccctaatcccatgtctctttctctattaacctttgttatgaattgtaccaccagctgcctagtaaggagctcaatcaggtaaggttaccctaagagaccttcccagttcctacatcttcctccccctacagctgatgtatcatcagaccccaccaattctacttccgaaattagactttgaatcctcctgctcagcattgcctcttcagcaccacccaaggtcaagccactgtcccttcccacagaaatatctataatctcagtagactccaaagtggtctatccatttcattctccagagagaagccagggcattatgctaagtgaaagaagccagacacgaaaggtcacacagtgcctgaattcatttatatgaaagagccagtataggtaaatccatagaaacagaaaacaaatttgtagttaccaggagtggtgggggttggggggataccgggaggggaggatgaggagcaactgcctcatggatacagggttttctggaggggtggtgatgaaaatatttcagcactagaaagaggtggaggttgtacaatattgtgaatgcgctgaatgccactgaattgctcattttaaaatggttaacttatgttgcatgaatttcacctcaatacaaaaattattttattgagacaggatctcactctgttgctcaagctagagtgcaggggcacaatcacggcttactggagcctcaacctttggggctccagcaatcctcctacctcagcctcccgggtagctgggactacaggtgcacactatcacacccagctaatttttaatttttatttttatttgtagtgatggggtctccctatgttgcccaggctggtcttgaactcctgggctcaagtgatcctcccacctcagcctcccaaagtgctaggatcacaggtgtgagccaccatgcccagctaaaaaatatatagacaggtagatagatatgtatatatgtatacatatatatgctttatatatgtaatattatatgtttgtatatatgtatatatatttaaagtaaagcagttctgtcccatcccacttaagcttctctgaggacttctcattgcatgtagaataaagttcacctccggaacttgacctagaaggtcttgtgtgacctgtctctgccaacttcttgggtgtcttcccacctgtgagtccctttgctcatcagactctagctacactggctcatttttaacatgatgaacttgttccttccccagggcctttgcacatgctgttccctctgcctgggattctcttcctccctctgtctcattctgttcacactctgctctgtgcttaacaaccttcaggtcttcacttacgtggtacccctgtacttctaattatcctctacgcaaagggcctgtagtaggttacttattttattttatttttcagagatggggccttgctctgtcacccagcctaaagtgcagtggtgcaatcatacccatgctttagcctctggagcctctggccatgaccttatttagtaaaacggcctctgcaagtataattaaattagagatctcaagatgagattgtcctggattatctgacgggctcaaaatccatcgacaaagatccttataagagacagaagaggccaggtgcagtggctcacacctgtaatcccagcacttcgggaggctgaggagggaggatcacttgagcccagaagttcaagaccagtctgggcaatatagtgagatcccatctctatcaaaaatttaaaaattagctgagtatggtggtgcacgcctgtaagtcccagctgctcaggaggctgaggtgggaggattgtttgatgctgggaagcagcagttgcagtgagctataattgcactgctgtactcttgtacagggtgacagagtgaggccctgacaaaaaaaaaaaaaagagagagagagaagaggaagagaagacactgacatgaaggagaaggccatgtgaagacagaggcagagactgcagtgatgcagccacaagccaatcaagccaatgtatgctaacaactaccagaaactggaagaatcaaggaagcattcttctctagagccgtccaagggagctcagcactgctgatgccttgattttggtcttccagccttcagaactgggtgacaatatatttatgttgttttaagccatatagttcatggcaatttgtcctggcagccctaggaaacaaacacaggaccctgctggttttctcccaaacacttaccacaattagtaattatgtctgtatttgcctattccttattttatgccttcttttcctgttacaagttccaggagggccaggaggaaccacatctgtcctgcccactgtcatgtccccaccatgtacatcccagttccaggcacatggcaggctcccccccacccccctgcctcccaaaatgtttattgaatgagcaaatggatccacctctccttcatttctctttacatctcagcggcagtccttcttgcatcttccaccttcacttctaactctgagctgttgcattagcaactccagttaaacagattttctggaaagccccggcctcccaatgaaacctccctcacttgctccccactgcacttccccaaatatttgggtctgcctcgccttttccatcactggttctgccatccatgaagattctccttgaagctttatcattaaaaaataaacccacatattctgtgtctccaaaagaagcttttacttttgcaaactctattgatttaatcctagaggctgctggcagcagtcccaggagcttaatcaatatgacaacacccagcgcagacagaacatcaaggagcctcggccaagatctcctgctcgggtcttcactgaccccgactgaatctcttacaaccatgaagacagatttacagtagggggcaggatatttgcaacagctccaggatcttgcttaggtgagcaaaaggaaatgcctccaagcttgaggcgcttcagagctatttgttaatttgcgactatggccgattcccataagactcaaggaagatggaagacaacaacagaaaaacattgcaggttctagaacctgattataaactccctggtggggtgagcaggggaggaacaggcaaaggggaggtgggaaaaagaagatgaagatgtcaagagttaaaaatgcaaagagtttgccaggtgtggtggcttacgcctgtaatcccagcactttgggaggccaaggcgggcggatcacaaggtcaggagttcgagaccagcctggccaatatggtgaaaccccgtctctactaaaaatacaaaaattagccgggagtggtggcagacacctgtagtcccagctacttgggatgctgaggcaggagaatcacttgaacccaggaggcagaggttgcagtgagccaacatcacaccactgcactccagcctgggcaacagagggagactccgtctcaaaaaaaaaaaaaatgcaatgagttaaaacagacattccttcaccccttagcagacactaagtgaccagagaaggagaaaaaaaggtcatagaaacaaggaggttgagaatgactaaatcaatgccccaggctttagaaaccattaatctcctcgaaggagaagtcaaacacttctcacattttattcaagattgaaaaacaggaaaattagaagcactataggaagaaattggaaagcaagaaatatttgttaatcagaagtttacatgcatgtgacatttccaaacctattgagcccttataggaaaatatgaatatccatccctaaaacatacatcaacataatcttcctggagacactgtgattagatatcagccccaaaatgcagataatgaggtatacagtcagcctagtctatgtcctgctgcagtaacaaacaatccccagatctcagtggttgaacacaccccaggtctatttttctactcatgctatgaagtgggatggggactgatctatgtcatcctctctccagcacttactttgagagagggtccatctttgtgcatccatgacagtggaggcaggaaaaaggaaacatggtgaatcccatgctcacccttaaggcttctgtccggaaggactcacgtcacttcccctcacatttcattgatgaaaccaaatcacacagccatacctaacttcagggaggtggggaaaatgacactctactctgtgcccagagaaaaacaagaaatgttagctgaacaaggtaaaggataccccctcaggaagatcatatgacttgcccaaagtaaagcagctttgaaggtgtcagaagtgggacctgaattcaagactaaatggtccatgtctttttgcactatcaccctgaacttggcaggagttgagaattaaatctagatagcagtgaagagaaacatcaatggaggcagggggcagaaggaacaagggaaaataatacatcaagtaagggagaaataaaaggagccagaaaattacaaccagaacataattaaaggagtttcatctttagaaaccaaaacacattgtgaaaagtagggaaaaagtgggggagttttacactcttttcagggagaggcaaacagtaacgggatagtgcaggggtttatatgaggctatataaggaggcggggacacaaccatgaaagaaacttgtacacttcttgttcttcctctgaagctgccatcttggctcagactgaaggtccaacaaatgctagttggtgcaacagcagctcaggaagctggggccagggcttaccaggacttccatcagctgcactgttcctccctggacattttcctgctcagttctgggaaatctggacaagagttggatgatgttccagaacagatggtgctagcttggttcttctgatcattcctcccctatccctaacccaagccagactggaagtaagaagggatcctggttctgccaccctcccggccagcaggtgagaattctacacagccaggtaggtcagtttagcactagagcagggattctggaaggactcaccatcattgccaactcatcatcaccatttcagttttgagcacctatgatatgccacctgagtactttctgtgcatgaatgcattgagccctcaccacctgtctgcctagaaatcctactggtcaactttcaacttatatccagaattagtagtttccagaagctgggggaagggagaaactggaagtaactactaatgggtgcagggtttcctttaggggggatgaaatgttctgagattaaatagaggtgactgttgcataacagggtgactgtagtaagtgctgtggaattgcacacctcaaagtggtaaatttcattttatcacaataaaaaaattcattttatcacaataaaaaaacttaaaaattataaccagaatccagccactcattattatctccacagacaacaacctggttccacccccactattacctgccaggaccaacactgtcacctccttcctaattccccagcttctgccctgcctgcccccaaccttcaaagtctgttcttttcacagcagccagaggagcctatgaatatctgagtcaggtcacgtccctcctctgctcaaaagccctccgtggctcccagctccctcagagcaaaagccaaagtcctccccgcagcccataaggccctccaaaacctgtcccgtcacctctctgtccttatccttgcaccttccctctctcttgctcactggcttcagccacatctgcctcctcactgtcacacatgtcacatatacccctacctcagggcctttgcaccagctgttccttctttctctagacatcctcacagcttcctcaagtcttggctccaatgccatcgcctcgataaagctctatctaatacagcaactgcctccccagccctttctctgctgttctcttcccattacccttataatcttctaaagtactatgcaacttacctactatttttgtttcttatcatacatctctccccatgagcatgtaagctcccagagggcagggacttttgtctgcttcctgtgtcttgaagagtgccttggccaccatgtatactccttcagtgtttgctaaacaaatgcacagccccatgaggcaaggactgttttgcccattttatggaggaggaaaactgagactcataatcaggtatgcagcagcaaactgtctgaattcacagcccaaactcaacacagcgatcgttccttattattattcacacagcaaagatggaccaggcagtgttctaagggctggggatgcaacagaagacaaaatagataaagctgagccctcatggaggtgatgctgtatctggttcagttgtttcctgcccaaactctcatccactctcacttttggctctgacagtggcctctgagtaacacagtgtgacatgccttcaactatgatctgaatgttctatagaagccgcctttccattatgcaactgtggtggcttttcttttgttatacgacgattatttgtcaaccccactatctttgcactcaaccatgggccccctgggctcagagacctcgtgacagtcatcttctcatcaccacatctgcaaatgtgtgggtggatggggcagcaacagtccacctcctccaagaagcagtccctgatttttcctccccagacaaatcttcgtctctctgttcttggaaactcaaagaactaagcacctccctcgagctgctgtgcaaatgtgtgtgttgtgttttatttggttcttccgtattttcactctggaagtcgacagttctggccagaatgccacccgcccccacaaaataaacatgtcattgtgataaatgttatgaaagaaatggggtgaagtctaattcagacttggggtgagttgctgggtcaggaaaagctctaaggatgttccttttaagaggaaacctaaaggttttattattgttgttgttgctgtcatttttacagacagggtctcactctatcgcccagcctggagtgcaggacgcgatcactcactgcggtcttgaactcctgggctcaggcactcttcccacctcagcctcctaagtagctggaactacaggcatgcattgccacgtccagccaattttttatttttttgtagagacgggtcttgctatgttacccaggctggttttgaactcctggcctccagcgatcctcctacctcggcttcccaaagtgctggggttacaagcgtgagctaccacacctggcctaaaggatttataagggttcaccaagtgaagaattgggcaaaggtataagtatttcacagcagctttgttcataatggcccaaacgagaatcaacagaaatgccaatcaacaggtaaatggataaacaaactgtggttatttccagatgaatgctattgagcaacagaatgacagaagccacagtgctcactcatccaacacatatttatcaactgcttactgcatgccacctgctgatctaggctgttctagtccacattggtgggtaaaaccaaaagatcaggtgtggtggctcacagtaatcccagcactttggaaggctgaggtgggtggatcacctgaggtcaggagtttgagatcagcctggccaacatggtgaaaccccatctgtactaaaaatacaaaaattagccaggcatggtggtgggtgcctgtaatcccagctactcaggaggctgaggcaggagactcacttgaatccgggaggtggaggttgcagtgagcccagatcgtgccaccacactccagcctgggtaacaagagcaaaacctcatcttcaacaaaacagaacaaaaaacgaataaaatcaccttcccttgtggagatcatagtgatgtagggtgacagatagcagacagatgagtaagtaagaaggtgaaaagttccaaaggggaaaataaggcagaagggcgggaggcaaatgctgagaaggtggcctttgagtgaagtcctgaaggagaggagggagaagccatgaggtcacctgagagaagaacaatgcagacagaggaaacagccagtgcaaaggccctgaggtaggactgtgcctggtgtgtctgaggaagagtaaagacaatggcaggagctgggtgagtgaggccagagatgctcgtgggcttttccaagtgatcttctcgggctttctcccaaggcagagaaaatcagcaatgggaaaggaaaatggcaacttctggagcttgggaagaaaagaggaaagaggaaagaaaaaacgaagagagggaagaggaggaggacaggcctgagctcagagtcctgccaccttcactcttcatgtcttatcagacaaacaagcctggagtcaggagagcccatgtcccagtggcctgccatgctgtcctaaaagacagaccaacagagagaaagaaaggctggcctttaagaaaggaagggcaaagaagaacataaacaaagcaacagaaaaagtaaagctaatatataataacatatactataccagccgttgacaaactctggcccatggcttgtttgtgtaaacaaagttttattggcaaatggccatgcccattcatttacgtattgcctgtagctgcctttgctataatggcagagtagagtggtcccaaagagacagtatttactagacattttctagctaatcctttgcagaaaacattttctgatccccgtactataacaataacatacaactatattagcatattacgtatttgtagcatatatagttgacccctgaacaactcaggtttgaattttatgggtccacttatgtagatttgtttccaataacagttacaccaagcgtgcttgtctttctggcctccccttccacctccacctctgccacccctgagacaacaagaccaactcctcctcttcttcagcctacttaatgtgaagacaatgaggatgaagacctttataatgatccctttccaattaatgaatagtaaatatattttctcttccttatgattttcttaaaataatactttctcctccctagcttactttattgtaagaatacagtatataatgcatataacatataaaatctgtcttcatcgactgtttatgttactggtaaggcttctggtcaagaatagactgttagtagttaagctttgggggagtcagaagttatacacaggctgggtgcgggggctcacacctgtaatcctagcactttgagaggctgaggcaggaggatcacttgagcccaggagttcgagatcaacctgagcaacaaaagcgagaccttgtctctaattttaaaatttctaaaaaatagagaaaaaaagttacacacacatttttgactgcacaggaggtcattgccccaacccctatgttgttcaagagtcaactatatttatctatgaatatataattacataacataaaatggtttattactattataaataacatgctgagttcttaccatgtgctgggcactgggctaagcttttctgcctatgctcttgtattgaatctgatcaaaaactcatcagattaggacaatattattattgttgttattattcattgagaccgtggactccgaatctagatagcctaggctgaaatcccacttttgttgcttgaggggtgcaagacctcagatagtgagtctctctctctgtttcggttttctctttttgttacacgggatgataacagtacccacccctcagggcactgaaaggatgagctaaattgatgcaagcgaggtgcctggcatattgaccagaactctcattaccatggctgtccttattttacagatgaggaaactgaggcacgggaaggtgaagtcatgggcagccaccactgccagaagtggagagctggcaaagttggggagagggtgataaaaactaggaatcacggctctcatgataggtggacctagaagacagcactggggaacttggtcctgtctacctctcacctcattgtcctagacctgggagtgggcagaaggcagggacctgctggtcagctgccagaggcaatgaggggttgctcttccgttctccatggaggggaagaaggccggttaagcttgaatggtggaagctaagacagtgacagccctatcatcacagatccttggaggagttcaaagaagtgggtggggcggggaggggacagaccattgttacagccgctgggctgaccctgggggctggagatgaggatgcacggccagtacagctggaccagattggagtcaggcgggctcacaccattgttaacatgcccagcttcaacgtcacttgtatacctacttctggttgccaagataggctacaaagaggtaggagcaggtgaggggcaggttgcttcctgcccctgggacccaagtccacctccctggacccagcctgagggaccgtttctaggtttcacctccaggaaagtgactgcttggttcaggcagcgatcacttgctttctgttctgactccatcaaggcatctttccccacccagcctcaggttaaggtgaggggcttgccaggggcacagactgcctgcagagacccccactatctcagttctacctcatctcctggagaagacagctatccaagcagaggaccccacactcaagcttggcatagaatttatctcccttggagaacacggaaagattttcacttaaagggaaagaatttgcagaacaaggaaagaagtaagggagaaaaaaagaagagagcagatactggcatgtagagggaactaagaaccaataaccatcaccaccactgctaccaccaataataagaatagcagtaaggaggccgggtgcggtggctcacgtctgtaatcccagcattttgggaggctgaggcgggcggatcacgaggtcaggagatcgagaccatcctggctagcagtgaaaccccgtctctactaaaatacaaaaaaactagccgggcgtggtggtgggtgcctgtagtcccagctactcgggaggctgaggcaggagaatggcgtgaacccaggaggcagagcttccagtgagccgagatcgtgccactgcactcccgcttgggtgacagagtgagactccgtctcaaaaaaaaaaaaagaatagcagcaaggcaaaccttctttttcttttttccacctgagaacctagtttcactttgtgaaaaagacaaagtgacgtgtccactaaaccttcttctccatggactgaatttctcagttccccctgcagtcagatggaccatgggtattggctgtcttccattaccccaaatccactctccttccttctttacccttctaggactgtcacatggggggctgacctgtgtggatgggctcactgggctcccagccctctggctttggacaatgggggacatttattctgccagcttcctgttaggaaatgctccctctctctctttctctccccccttctttctctcaacttgtgtgtgtgtgtgtgtgtgtgtgtgtgtgtgtgtgtgtgtgtgtgtctttgtgagtctcagtctctctctgtctctgcctccttcctctcttcctccttctctatttcagtaagggcccacacctttgtaagctatctcttaatttgattcttaagctatctcttaatttgattcttggtctgtgtcttccgtttcctactgggaccctctctcatacaccatgggatgaaattccagtccacagaatgcaggcagaagtaaggttcactacttctatatgtggcctcccaaaacttcctgtgtgagccttcatactcttttcctacaggccggaagtgaaggactttctgatcttaggggatggtggagccacagatggaaagagccgggtcctgaaatcaccacatggaatgccacttgctgattatctgattggatttagggtgagtgagaagtacattcgtattgccttaagctactgcagacttgggggttgcttgttacagcagcaagcatatcctaatacacctttaagaagactgctcttccccacttggagaagttggctccaccccaactccataaagtcatgtgacccaagcctaagccaatcagagcaccccgttctccacctcccatttccccacagtgattggttctggcatgagcacacgacctcagcaacagccaatcaaaagcaagaaagcatttgctgaaaattccgggaagatagctgaaaaagagagaagaatctctctctgaatatggtcttgggcagactggagggctggaagtgcagctaagtcatggataatggagccagctgcaaaaagtagagccaagaaacagaaacagaggcctaatggtgttatctgatccctagatccaaacaagcctgaagctggacactcctgagactcttcagtctcatgagccaatacaatccccacttcttgtttaagcccctttgagttttccacctcttccaagtaaagggaactaagggattcacataggtaaatataatgagtccacaccatgtgtcaggcccactgacctcacagcaagtcaacaggtagatatttttactttaattcccattttataggcaaggaaatggggaccttttaaattggccaggagcacctcagtagggaaattatttgcaaaagagtatgtttggggattgggtgtgtgagcttgagtaattgggattgggctgaaagtccagaaaccaatcctgaaaccaacatcttttgtatgatttcaagagtgccaattaacttcccccgttctataaaaaatggagataaaaacccttccacttctcccccaccaattccatagtgtcggtttgggtaacaaagtaaggtaacagttaaaaggtgctctgaaggaaaggctagcaactcatccttgctgttgttaataaacagtcattgttgaattggctccagaaaccctgggggccaggggctgtccagtgactctcttggccagaattccaaagaccatctgtggcaaatacatcctccagagcacatacccttggcaggatcacaaactgcttttctcacccagaaaacacaaccagaaaagaaacagagatagagagaggggagagaggggaaaaatcatgccagctcaaaatttcttttaatctgatcaatgatttccatctccacagccaccatgccagcccaaggcacacttccctgaatgagtgaaatcatttcctaattggtctcatggctttttattcttgctgtattccaatacattctccatgcagcaaccagtggaactattcacagacataaaatcattgtattactgcttcagtagcctgacagtgcctttaggataaatatcaaactcctaagcaccttccacaggacctttgcacatgctgttccctgtggccaaaacatcttttccaccattcccacccctacaatagcagaggcccactaaagactcagtttatcagcacttccctggaagatgttgtttcacatgtttcttttagagcaagccagacttgtccctttttgcaaggcctataacattttaaattataagtagtaataactatttacatgtcatccttgccagactgtaaactccatgaaagccatgattgcatctgtcatatccgtcactgtaactcagtgcctggcacacagttggcactcaataaatatttgtggcttcaaaggttgagtataaaaacagaccagatgaaagaaggtaaaagttaaacagtcaagaggttgtcttgcagatcattggggcaagaatgggctttttaataaatgatgctgggacaattcttatggaataaaaaggaaattggacccctacctaccaccacatataaaaatcaatcccaagctgattaaagacatacagtgaacacaactgtaaaactttcagaaataacataaaatatatccatggcctcagggtagaaatgattttcttaaataagatacaaagcccacaaactataaaggaaaagatttctaaaatcaaccacatcaaaattaagaactgttggtgatcaaaagacattataaaaaagatcaaaagccaagccaagagaaaatattgcacaacatataatgatgaagaatcagtttccaggctatgtaaggatcacccacaaatcaatattttttttttaaaagtgacctaatcaaaaatggacagagcatgtagaggcacttcacaaaaaagcaagcttgaatagtcaataaatattttaaactatgttcactctaatttgcaatcgggggatgcaaactaaaatcacaatgagaaatcaccatgagaaaggctataacttaaaaacctgacaataccaagtgttggcaaggttgtgaagcatcttgaatgctcacccaccaccggcaggagtgtaaattagcacaagcactttggaaaattgtttggcagtgtttagtcaaggtgaaaatgtacaaatcttagtatccaacaatttcacacagagcgatgtgctccagagagacccctgcaagcgagcagcagaatccataaacaaccaacaaagctgcttatgccagtgcccaaaagagaacaaagtcacatgctcatcatcaatgaataaacaagatcatgaaggagctgcagtgaccacaatgaggatgaaatctcacaaaggtaactgcaaaccaatgaagcaaaatacaaaacaactcctctcacatgattttattcatataaaactcaaaaccacataatatctgactatattgcttcaggatgcgtacttaggtggtacaaccacacaagaaagcaagcgaatggttcccatacaatctccaatagtggttcctccaggagggaaggagtggctgtgattgaggatgagcatgagggagaatctgatggtggccctgtggctcttgacctgggtaaaatgggtgtacgcttcatggtttggtctttaaaatgttcatctatgttcctacactgctctctaggtttgttctgtctctctctctctctctctgtctgtctgtctctctctctctcacacacacacatacacacacacgtcagttaaagactaaaaaagaaagaagacacatacaccaaccaacagtttatgctgagaaagagaaaaggggaaaatacccagacagaaaattaaaagataacatagacacaggaaatgaaaagagatgacgagttggcaagacggcgagggtaaggaaatgagaactggagagacagaaaaaagaaaaaaataataagatggtcaaggataacaggagaaggggaagatacaagaagcaatattctctctcttctttctgtctctctttctctacctccatatctctccctctccttcatcccttccatctttgtctctctctcttttccctcaccattgccttccttgcacttcctccatccaggtccttctctccccttccatctctgtctctttctcaccttccacttttctttctctctcatctctctctctctctctgtgtctcctctttgtctcctctgtctcttccttcttccctacacacgcagcctctctttcttttaacacttatttatcaggtggctaccctgtgctggacacagtgctaaaaaagaggccctggctgggggaaatgggatggcatggcccaccgtggttcccaagcatcagtggcacggacgcctgcccagggcgcctcatcccagctccagcatggacctgtgggccgcctgccactctctccccatcattaatttcactatcaaacactcccagcatcacaagttgtaggtcttatttattaaatatttaactaggagaaacccagctgagatgaaacctctcatttgtggcagccacaggagagcagaacatggacctgctgctgggattaagccaggctgatgagtagaaccagggtgcccagagggggaaacaggtgggggcagcccccagtggggagaggaagacccagaaatgcagggagctgggctttcacacagtctcacctggatggcgagaggttgtcagccagggaaggcgagttcaaaaacccccaaaatcagaataggtcaatctatacagacagaagattagtagttgccaggggctgggggagcggggagagacagggagtgagcgctcagtgagtacggggtctcctttttggggtctttgaactacagagaggtgatggttgcacaacactgagtgtattaaatgccaccaaactgtacactttaaaatggttaatggtcaattttatgttatgggaattttatctcaatgttttaaaaattaaaaaaaaaaaaatcccacacccaaacccattaaccattagctctaaggctgctgacctcattttttaaaattcatgcttattacacaggcactgcttactatcaatccaaggcactcgctcagcattttgggtttctttcttttttagaaatagggtctcactcttgtcccccaggctggagtgcagtggcaccatcattgttcactgcagccttgaactcctgggctcaagggatccccccacctcggcctcccaagcagctaggactacaggcatgcaccactacacctgggtaatgtttaaatgttgcccaggctggtctcaaactcctggcttcaagcaatcctcccatttcagcgtcccaaagtgctaggattataggtgtgagccactgcatctgaccctactcagcactttgaatcatcccatcatttacttctcacagccctgggagggaggtgccagcaggtctctagttttagagagaagggagcttgtggttcagagagggtaagtggcttgcccaaggtcacacagctccaacttcagtctacctgcttagccacctaatgggctttctgctaactctggctgaactttagaaacccttggggagttttcaaacattccccactccaggggaagccctggacaaatctctccagcatctgtgggggtggagcttggggcatcagcattttcctttttcttttcttttttttttttttttttttttttttgagacagagtcccactctgtcacccaggctggagtgcagcagtgccatctcagcttactgcaacctccacctcccaggttcaagcagttctcctgcctcagcctcccaagtagctgggactacaggtgtgtgccaccacacctgggtaatttttgtaatttttagtagagatggagtttcaccatgttggccaggctggtctcaaacttctgacctcaggtgatccacccgccttggcctcttaaagtgctgggattacacacgtgagccaccgtgcccagcctcagcatttttaaagcttccaagtgattagaaggtgcagtcaagatcacctgaggaatctcactgaagagcagattgggattgagcaggtctggggtaggggatgagattctgcatttccaacaagctcccaggagatgctaattctgttggttcagggaccctggcaacatgtccagtaggatgctctagatctgcactattcagcacagtggtcactaagccacacagggtcatcgggcacttcaaatgtggccagtgaaactcagggactgtttttattgtaattaatttcttttcttttcttttttttttttttttttttttttttgagacggagtctctctctgttgcccaggctggagtgcagtggtgcaatctcagctcactgcagcctctgcctcctgggttcaagcaattctcctgcctcagtctcccgagtagctgggactgcgggtgtgcaccaccatgcccagctaatttttgtatttttagtagagatggggtttcaccatgttggccaggatgatctcgatctcctgacctcatgatctgcccgcctcggcctcccaaagtgttgggattacaggtgtgagccaccacatgtggcctgtaattaatttctaaaattgcaatagccatgtgtggctactgcctaccttatttggcagcataggtctcccgggctcaagagatcctcctacctcagcctcccaagtagctgggactacaggcatgtgccaacaccctcggccaatttttgtatttttttgtagagacggggtttcaccatgttgcccagcctgctctcaaactcctgggttcagcctctcaaagtgctgggattacaggcacaagccattgagcccagcctggtctgcatctgtaagtgatccaagactatggccaagggtgagacaaacaccttaggggagcaatgaagaaattaggaactcacttgggtcctccacctttcctttctcagcactggccacctgttcaggggccttcacctgtccccttgggtctccccaacgaatccctgcttcactccccagagagaaccatcagagcctccccacaccagcccctgacttctcctactcctcagatcaccctaaatcaagcccacatctccccttgggtttcctcctatctcagtttctcagttgtatctcctgtcacctccaaatgcagctaagatcacctgggagatctttatttttgagccttagtacttaccacactcaaactatcctttacctgtttatctggtccttggactccctctctctccccacccagaatatcagccacaccagggcggggatttttgtccgtgtgtttatttctctctgtgttttgtccatctacgtcccagtgcccatgccaaggaggaaattaagagcttgctggtcattagagaaaagtaaatgaccagcaatgactacctgctgagaatttactatgtgccacgcatgatgttttacagtcaccatccacttaatccttgcaacattcctgcaagaaaatgctacactgcttatcttatagatgacgaaacagagtggttaagattaggtagcttcccaaaagccacaccaccgatagaaacctagtcctagcccaggcgtggtagctcacgcctgtaatgccagcactttgggaggctgaggcaggaggatcacgaggtcaagaggtcgagaccagcttggccaacatggtgaaactccatctctactaaaaatgcaaaaattagctgggtgtggtggcgcgtgcctgtagtcccagccacttgggaggccaaggcaggaaaattgcttgaaccgggaggcagaggttgcagtgagctgagattgtgccattgcactccagcctgggcaacagagcgagactccatctcaaaaaacaaaagaaaagaaaggaaaagaaaagaaaagaaggaaggaaggaaggagaaagaaggaaagaaagagagagagagagaaagaaaggaaagaaagaaagaaagaaagaaagaaagaaagaaagaaagagaaaagaaagaaagaaaagaaggaagaagagaggaaggaaggaaaggaaagaaaggaaagagaaaggaaaaaggaaggaaggaaagaaaggaaggaagaagggagggagggaaggagggaaagagaaaggaaaggaaggaaaggaggaaggaaggaaaggagtaaggaaggaagaaggaagggagggagggagggaaagagaaaggaaaggaaggaaaggaagaaggaagggagggagagaaagacaaaggaaaggaagaaggaaggaagaaaggaaggaaggaaggaaaggaagaaacctagtcctagttgagctcagactctgtcccttaaccatcgtcccgcgacatctcttgcccactcgcacaccaacctctctggaatgcaaatggtttcccggagaaaacttgagtatttttccctctgggtttttatccttgctgtgccttcacctgtctcataaagtttctccatttgctagatgtgtgaccttggcaagcagtgttagctctctgagtctcagtgtgcacatctgcaaactgggggcaaaaataagtgccatgagctctgggggctgggatgaagttctcataaactgccagggcagttctataaagcttaggggctcataagctccccacagagaggagctactgttactgtaactattcaccacaaagcagagagtttccatgtcctcctgggacatggtgcttcctctttatcagggatggagtgaaatcctgacatgagcaagggcaggagccaagaaaagggcctttccgtcatgaatgtggaaaatggtctgtttgcttttcatcaggttttgggggttggggacatgggggatcctgtttggtcagttagaggagttgcagctggtcctaaagcttggagagcttgcactaaatcttgtggctgccatttcgctttgaaataaaggggctgtctaagggccaggtgtggtggtgcacaccgatagtcccaactactcaggaggctaagctgggaggattgcttgagcccaggcggttgaggctgcagtgagccatgattgcaccactgtgctccagcctaggggacagagtgagacctcacctctaaattttaaaaagggcttgtcagcaccaacagaggtacacagaggcgcacacacactattgcactggggagggaggaggccgatacctataacactaatacatcagactcttatttggcacccactgtgtgtcaggtactgttttgagtgctgctttcctcacaaccaccccacaatgcaggcactaatgttataccacttttactgatgaggaaaggcaggcccagggggctaagtgatttgcctaaaatgatatgaatggaaataagcagagttggtatttgaacctaggcagccaggctccacagcctccctccctccactacactggactgcctcaagccccacacagagccatgacatgcctcaatttcaacagaaacttgctcaatccctcaaagacatcggtaaagaatgtgcctgagaaaacagaggaaaggatatccaaacagcccacagagatctggaaaatgctctatgtcttaagtcaccaaagaaatgcacaggataccacaacaggatttcactttcacttatctgattggtgaagatgtaaaatcaagggagggcaagcctgattgggccacgtcgtcagggaaaggggaccttggaatttgaaagggcacagacttcctgtttcttgcaacctggcccaaaagcctgacatacaaccttgccataccatttccaggaatctgtcctagggaaacagtgacagaagtgtgcaaagacttctctaccaggatgctcactgcagtgtgatcagtgttggtggaaaaacggctggtctcaaaacaaatatacaaaaggaagcccatttttgttatgaaaatcaaaaagtttaggtatatcggggggaaaaaaggagtggttattccatttcctttggaaaaaaacaaaatcctcaccatagttcacaaagcccagaataagccaaccttgtcacctccctgccctcacgtcctcccattcacctagcatacagtaggtgctcagtcaacatttatgaatgaatgaacgcactccttcccattcccctccatctctaagctgatatgctccagggtctctctcctgtacgttcctaagggtgtggggatcaaggggatatagaaacacagtccataccagcagcattcaccatgccaggagaccaaagaaagtaaggcacgattttcaaacagggcaacagaaggggaaggagagagaaggggaggccgccgcagttttcattccaacattttccagctctgggtgagatttccttctatacactcatctatatttacatcaacgaatctgtcggtagcaagcctgttgcttcttgtgtgggatctaaagttcacagaaagctggcttagacacccagctaggaagacaaactgtaaattaaatttaagtcacccaaaaaccctaaatccacccactcctcttgaagaaacccatgacatcgattacatcaagatttctcaaccttggtattactgacatttggagctggataattctttactgagaaaggctgtcctgtgcattttaagatgctgaactgcatccctggtttctaccagccagatgccagtagcatcttgccccctccccctacattcgtgacaaccaaaaacgtctccagacattgccaaaagtccccttgggggaaaaattgctcccagttcaaaagcactgctttacatgcagcccaggaaaaattccaaaccatttaactgttctttctctgttccttgtcatcaacatcctgaatataccagtcacctgttctcaaaattccttctacagattcaaagaaagtggtaacagcagagtttcaattatgggcttggagtgccatatatagacaggaatttcattcagaaaactatcagaaccttggacagagattcacacacaaagatgtttactgcactgttatttataatggcaaaacaaacagccagagattgttacatgaatataatacacgtataaagtggaacattatcagatattaacaacagtcttttctggggttgccaccaacccatacagcaccactgtatgaatttaaacaagacacccctttctctggttgtgaaattaaacaagacacccatttctctgattgtgaacttaaacaaaacacccctttctctgtcaaaaattgtcataatagcttcatcttgctagaacaagatacttaagcttttatcagctggggtactgaaatagtagacatacaagctccatgatacttaagatatgtgacatgctatctttgtgcagtgcacaacctgtgcaactatacatggtggcccttattttttcaaggatacctagtggcatggaaatgtgttcctaaaagtttacatgcataaaaaggtatgggatgaaatacattaaaatgtcttcagagatttttttgtggatgagagagtatacatatattttatattcttttttgtacatgagatgttcagtaaatgaaaaggataggcctcttggaggaggtaacttttgggctgagacctaaatgaagagaaggagttagccatggggagacctggagaaacagtgatgcaggcagaggaaatagcttatgctgaacagaaggaatgtcatgtaatgcaaatgacatgggtgtgagtaaaatggtcagcagggctgagacagaatagacaatgaaaggaaggtagacaatgaaagagatgagatcaaagacaaaacagggaccagatcacatggggccttaaaggaccttgctacatcagtgtgttagtccgttttcacactgctataaaagtaatttataaagaaaagaggttcaattgactcacagttctgcatggctggggacgcctcaggaaacttacaaatcatggcagaaggcaaagggaaagcaaggcacgtcttacatggcagcaggagaggagagagaggaaagaggcccacacaagtttaaaaccatcagatctcatgagaactcactatcacaagaacagcatgggggaaatcacccccatgatccagtcaccttcaccaggtccctcccatgacatgtgggtattacaatttgagatgagatttgggtggggacacagagaaaaaccatatcaatcagtaatctgtaatctctgactagtgggtaagaatctggggcatttacccaatctgcttggaagagaaagagtctaccagtccaccaccacatgctatcctatccaccaatggagcaaaatccaaggaattccactttcagtcccagtgctgaaacaaaaccaggtgtttccagaattttaataatctttgttcaataacactgtttactttcctcaccattactcaattaaatacttatgcatgatatagtgcaggaactttggggggatgtgaggaaggcaaatcactgtcccctaccctcaaggagctttctaattacataggtaaaacctaagcatataatatttatttatttatttattttgagatggagtctcgttctgtcgcccaagctggagtgcagtggcatgatcttggctcactgcaagctccacctcccgggttcatgccattctcctgcctcagcctcccaggtagctgggactacaggtgcccgccaccacgcctggctaattttttgtatttttagtagagatggggcttcaccctgttagccaggatggtctctatctcctgaccttgtgatctgcctgcctcggcctcccaaagtcctaaacatacaatcttattgatttttacaaaagtgtgcaaaattcacttgatactggaaaaggtacaaataaggtggtaagcggagagacttggtcattcccaagtcaaacagaacaccaaatatcagggagacccacacatagacagctaccctaccatacacccttatatccaacatccacccatccacccacccattcaaccatctatcatccactcatccacccatccagtcatccatatttttacccctcaatccagtctagtcatctgcctatttattcatccagccatatattcactcatacaccaatccatccagtcatccatccagtcatccattcacccatccatttgtccacccacccatcgagtcatctaccaatctacttatccacccacctaccctccaatcacccatccttccttccttccttcatcccatccatccatccatccactcatccatgcatctgttcaaccatccatccatccatccatccatccatccatccatccatccatccacccagacatccaacactaactgcagaggatgcctccatcccctctaaaccacaaacatccagctatgatccataacttaaaagactgcgttgtgatcagaaacaggccacaagtcaaaaatttgcattctgacaactctttcaaagacaactcaagtctctaaacatttctgaccattccaatttgtgtaagacccaaacactccatgtccttgtaaggccctcagagaagctaacctatatttggtgctctgaagtatttgatgtcttcaaagacggtgcccttagggagaaggtaagactagagacagtatagttagaggaaggggaagctgtggggagattggagagtctggcaatggggcataacaaatgagagaaaaagattagaaacatggaagaaggattgctgagacgtggggaaaatcctacttgggcctaggaatcatggaattctagtatggacaatcaatgagaccttgtgattgtgttctccttggcttatatattggagcaacagtgattcagctgatcattcagaagaatgggttaacaacacagacgccaaaaataacagagatcaagggagttgagagacttggcaagaaagagcagaatattaacacttatgcagcacctactgtgtgccacacactattctcagcagtggatcagagaagcccaaatatggccacccacataagtccatccatctatccactcttccatgtataaacacatatagtgcttcctaagtgtcaggcaccactctaaacatcagatgtattaactcatttaatcctcccagataggagctattaggatccccatggagctattagaatcaccactgggacagactgggaaactgaagcacagaacacttaagtgacttgcccaagatcacgcagccagtgactagtagagctgggatttgaaccccagccacctagctccagaatccatgctctcaactcaaccatgctgcttctctacaaccatatcaattgccagtgtctaaaccacaggttctgactctcagaatacaagcaggaccaagagctaaccggttgacccagcctcttagagaaaatgatgagtaagctgtgaaatgtcttagctcctgccataaatgctgatgaatctcagctgattctaggtgaagctagatttccaagtacacagactaaaattaacacctcgaattcattcattcaaaattattgattccttacagcagcattgttcataacagcaaacaaacaaacaatcccccaccccaaactagaaacatcccaaatgcccatcgtcctgcttgaacccgggaggcggaggttgcagtgagccgagatcgcgccattgcactccagcctgggcaacaagaatgaaactccatctcaaaaaaaaaaaaaaaaaaaaaaaaaaaaaaaaaatatatatatatatatatatatatatatatatatatatatatatatatatatatatataaatttatgttgttaaagctgggtacggtggtgcatgcctatagtcccagcttctcgggaggctaaggcaggaggatcgcttgagcctaggaggtcgaggctatagtgagccatgatcatgccactgcactccagcctgggtgacagagtgagactctgactcaaaataaataaaataaaattcattgagttggctacttcacaggatgattatatatgccatgtgctttctgggtacagtatcttttaaccttcttacaattcctcggacataggactactgtccccgttttacagaggagaagactgaggctccacaactgtgagctggagctgagatttgcagccagggtggactgttcccaagctctatatgtctcccctccatccaatatcaccttccctcctcttttcctccttacagcctccactgcttgtgctgttaatcaaacagacacattcctatgcagacgccacaacatgccacgaacacatttcactgcagtgatggtcagcatagccctcccacccacacacaccatgcccatcattctcaataaagaagataataaagatcatggagataaaagaacgtgacagactctggaagatcagaatccatgtaacaccactgcgggccaagttttaagtctgccccagagtctcattgaagacaaatccatccacttttacaaaaaggtaacatccagacttcgccctcctgcaaatgctgttcgtatgaaaatactttaaaaatcagtttaaaattacatatattttttacacataggcctaaaatgagaacagaacttaacagcatgaatattatttactggcaagtgggtgactaagttgggtttccctcatggcttcagagaggggactcttgaatcctgttatttgggggctgggggtgggaggctgctaatttctaactgcaggtgccgcctgagcaacaggcacctttaaggaagactcacggctgctcccagtctgaacggcagataaagccgtgtctgaccgaagcgagatgtcaaaacttgatccggacttaactcaggcatttcccttcatagctggaatctctcttgtattagctgccttaaagacggcttctaaaagctgcattcattccaataaaaagtcttggcttttcagagggaataagtaactgactctccccctttcttggtcaacggcaccatctcttgcaccattcttctctctcaggtgttaagaactcaccattagggtgaccagcgtcccagtttgcccaggactgtgagtttccagagatgctaaacccaggatagtcccaggcaaccctggctgaagggtcaccctactcagataagaactgaggcccagtggtttttgaaacctaagttgctgtgcccactcatggttccctcgccaggaatgttccttgtttttcctatttttttagggagtgaggagaaagaagaccaaagtttggaaggggaggggggtacctaaattctaaaccaaaagttgagcaaagtttttctgtggagtttgcagtggacacctggggtggccatcctgggctgcactctcgaccggccccaaaggaagagacagggagtgcaaaaggggaagagggaagctaattatatactttaaaactccctcaccttgtcacccacagagagagggagggaccaaaggaggaaagagaattaatttttaccttagactcaagggaatagaaaaatgggtcaagtggccacgaattttttttcccctgaaagcttccagagagaacggagaatgcaaaatgtccaaaggtggctttaaagagcgccacgatcaggttaatcaatccacactgaccagtcgcagggggtggtgggggggggcacttcgctcccattcccacccagaaagcctcttttctggccggtttccaaaaaaagaacactggaacctaaatgactccatagtattacggctctggcgttttggggtttttctctgtgctggagactgtgctggccatttttcacgcacgaccccatttaatctcctgagagccctccaagggagatgctactagaaggaatatcctcatcatgcatgtcaagaaataggctctggtgcccaagataacatggctggtgaataatgtgaacctgggccagtctgacccagagtccggagtgttttccctctcctctctgccctctttcagagcaggcaccatcccatccggcccttttctcaggagctgagctggcattctcggaaatgcgttactgcacggctcttaggctctgatcatttctggatggagtccaccttcccggcggtgctttttattgctgagaaagtgtatatgtgtgcttgctactgggggggaaacagggagggggaagcataagccctacgcacccaacagatgcctcccactccaagtccctgaagaaagacttcattctcaaggggccgctgcatccaatctactcaagcactaacatttcagaaactttcattggtctgataatctcatggacagtctctcaaccccctgcaactaaaacccatcaaaatcctaaaacgttggcacaagggtagatcagatagatgttatacaatttagttaatgggtgaagacaggtaccttttctcatttgctcagcaaacgtttataggacgcctgctttgtcccacacactggggttgcagtggtgaagaacagggtaaagatcatgggtctcacagcctcagagcttgactttttcctggggaatggtagaactaccagggaggggtggaaccccacccaagagaaccccttctttctctctctctagtgcaggcacatagctttgaatgacatccttaatctttcttatttctctgaccgggatttaacactattacttccactcctttccatagatccacatccttaatcctaagccatcgaggccagacgtgctttggaattcagaactcagggcttttagacgcattgcaaagatgggaatgtaaaatggtacaaccacttaggaaaacagtttgagagcctcttataaaattaaacatacacctaccacacaactcagcaatctcactcctgggttaatttacccaagagaaatgaaatgtatgaaatgaaatgttcccactaaaacccataagccaatgtttatagcagctctattcataatcattgaaactggaagcatcccaatgtccttcggctgggaagcaaactctggtccatccatatcatggaatcctgctcaacaccaaaaaggaaggcgctactgtcacaggcaacagcatgaatgaatctcaaagtctgagtaaaagaatccacattcaaaaggctatatactgtgaaattacatttatatgaccttcggcaaaaggcaaagctgtagggatggagaacagatcagtggttgaaggggctggagaagtggggtgctgactcaagaggggcactgtgggggtattttagggttgatgaaactgtcccatatcttgatttgggtggtggccacaactacatccatttgtcaaagcttgcagaccagtatgtcaaaagggtgaattttgctacaaataaattatacatcaataaatctattttttttttgagacagagtctcaaaaaaaagtacagtggtgcaatctcggctcactgcaacctctgcctcccaggttcaaatgattctcctgccagcctcccgagtagctgggattatagacgcacaataccacgcctggctaatttttgtatttttagtagagacggggtttcaccatgttggccaggctggtctcgaactcctgacctcatgatccaccggcctcagcctcccaaagtgctgggattataggcgtgaaccaccagacccggcccctataaacctgatttttaaggaaaagaaaaatgataacaagatgtctctatgatctaacctggatactccaaccctagcccatgaacttaccacatggggaatccctagaagctagctagaaaagcagaatcccagaccccacccaaatcctgctggaccagaaccatcctgttaacaagacaacttccatacacctgaaagtttgacaggactacaatgcagacctaacagtcaggagctgaagcagcacctcatcatcaagcacatctaacatttctgctgcaaaacatactcaaatgcacaccaagtagaatgaatgaaaactgtaaattaagacttcaaactgaagtcagttcaggttaggttttacctctatatgagctcgtcttttggtttttggagctttttggattggggaattgtggataagaaattgcaccctttttgaaaatactcccattggaaaagccgtgctaaattttacttcgcagaattttgctcctctggaaataccagccaagccggtctagtacaaggatcacgtaagtgacaccatcctgccctctacggcagtaccttctagaacattctatctctcaggacaggccaagagtctgataacctgctcccatgtctcccagcgcttctcatgcagaaagtttctctttagagagcttttcttaaaaaaaaaaaaaaaaaaaaaaatgagaggagtgccaatcagccaatgtccacagatgtcaaagtgatgtcacctgatgtcaatgtgactttaggtgtcttgttaagatttctgcaaaccggatgaaaagctggaattctacgtgtaattcaggcaactgtgcgtgataatacactgacctgcttccagtgttcctccgatggcctgagtttctacatcatgttcagtgggagacctggtggcacagggagggctggaaagatgacattcaccttggcacttggtagaaggagtgagtggcattaagtggggagggaactctaggaaggctgacagatgctcctttttgagctgacagatctgagctcttcggcaatcatcagagaccctcatggccctatttgaatcacaattccagtcaatgaaaacatgaaaccaaggtgtgtggtcaagacggcttgctgcctggcatgagaaaaacacggcaatgtaaatttgaacatcaaagacttccatttgggtttcctcacttaggaagaggggaaaaaatgaaataaatgaggattcttaattgtcattgatggcttcaagtttgacccactgagggatgaaagaggaagaaatcatagtgacaaattgccccgagtgtggagaaagcaagactgcatccttcaccagtgtaccatgccagaatttacatttggaagtagcactcttaggccctgtgagcataccgacaagttcatggatcattcactcacttctcttaaacaagacagggaggaacctgctttccatatcgacctgcaacccttagtcaacaccatttccaaatacacatcccacaacacatgcatcaaaaagtagcaggggcgattccactcctatctaagagaactgtgggaaaaaaataatagaagacacaagaatgttcccagtggcacaaacagaaatgacacaaatgcccatcaacagtagaatggatagattgtagtagagtcacatacacagatgtgagcaaaagaagccagtggcaaaagaacgtactgtgtgactccatttacatgtttaaaagaggcaaaatgaaccttagaagtcaggtgagcggtacccttgttgggggagcaactaggaggcggtatggggagggggacttccagggcactgatcgggacctgggtgctggatacgtgggtgtgttcattttgtaaaaatctatgcatctgaatatatgtacttgcctgtacatatattagactttatttaagtacctacacactttttttttcactctcaggatatgctgaaacatttttttttaatggcagaaatatttagattaaaaagtagaatgttctgccctggtatcgtgactctgacattccacgtgtctttctctttacactggcctgaattcttttattcactacctccctccccaggtctctgtccatcccctctcatctccaaccctcccacccaccccgccaccgccctccgctccatccaggacagagaaagctcagtcctggatgacccagctcgatgacagattgtgaggtggggagttttcccttccagagtagggctgtataatgtgtttgttacctcgggtcaaagagaacaaaaacagtctgcagagagcataatgcacaaactcatcataagagcaagaaagccccgggcgagctggccagagaatagatgaagtggcaagcaacactcgcaattcacctgcctccctctcccacgattcccccttccgaggggccactgcaatccccctctcccccaacagccctccaatctgcaggattcaggctggacagaggtaagctaaggacacagcagaagggctccccacctccttcctttcctcttagaagtctccaaatccaggctccagaaggcgatctaaagccattttcaatgaggaaacctgtcagccgagcaaagccctctcactcctggagctaactgggtgtgcacccatgaataccctgtcctcctgcaaggcactcccactcctcactctgttgataggcagagtaatcaagccacccctgagcacttcaatgggcctgggatggtgaggaattgctaaccttaagaaccagcctctttaagagtctgaaacttaggaagcaaagacctggcacctgctttgggcaccaacggagatggcatcgtagttagaggtatgctcccctcaaaagcacctctgctgaacttcttaattttccccaccctcaaagtagaccactcacacactccaaaacctcagtgccctctgttgcaatcccagcacccaggatccaagcgccaggctcgattttgaacccccctgaagtgagtccctctaccacccgccatgctcctcaaacagcaacccccggagaccacacagggcccagccccgtttagtctataactgcaaaaccacatacaaaagggataggggactcatcgctgagccccagggacccatccagcccgttcatttttacacagagggcagctggttggaactgtgcggagaagcggcacatctgggcatggcacagtggccagccagcctgggcagcagggtgtgtcccccctcctggaatctgggtcatgcttagataactgctagaaagcccgactaattacccacccttgcctgcctacatctcgatagatgttaagccctcctcaaggtttatttcaagcaggcagggatttaaagaaacacagaagatctgcattttgatagcatctccacagaagaaaatgtgggcttcacctttttcctctggatctttgattaaaaaaaaaaaaatttaaaaggcatttacctacctaagatgtccacatgggtgctgattctcctggtgttccctctcggctactcggggtaggaaaagctggacatggtgctctaaaatggacccaccacctcatttgctgttgccctgtctttcttactgaaagtgtccagatcaggtcttcccaggccaggggcccagataaagcaagtgggatctctttctcgacacccccaaagatgatgaggttccccaatcagcggttaaaggcaatgggacctgcacacatgagggaaacataagcgccccccagcccatcactatcctctccagataggaacagcggcccaccctggggtactcacttcggccagtgctggcttctcagtgtgaaggccacatggactccctcttgctcttagccctgggagcccccaagcgccctgccctaaaagtgcggcggccccccaccttggggaaagcagtagtggagaggctgtccagcttcccctgcgtggactccagtgagcgacggccaagaaaacccaaccaaggcccccatagttcccctgccctggccagaagcgcccaggcccgagcccgctccaagctcactccgtagaactccaaaccctccggacttggctcgaaagcccccaccaaggctcctgcacgaccccaggccccagatctcattctagagtcggtccttgggaaggatccactctccgctgcccaccccccagccccccacaaacccattcccaagcctccagggtagctcaacccagctcggggtggagagattctttcacactcctcccggtgccccctctcccagcccctggaagacccccctcctccccacctcccatcaacccccgggtctctctcccagcctggaagaggggaggcggagggaggagggggaggcgcagctgctgctggggttcgggcaaaaggatatggccattcggtgatctttttggcgtattttctcaccacgttgtcttcgctgaagaggaagagagaccggttaaccgtgaggcagttctgtcggacggggatggggttgtagagtgccatggtccgcgctctctgcgccattgactgcttgtacatcctttgcgccccgggctgcccgccctgccggctgcccccggctcctcgcccgcctccgctgcccacgaccaccccggcggctgccccggagcctcctcccccgtagcgggccggcatctcgtctccgaagcgggccattctgcaaagagcaaagggctccgggttacgctgcggcgaacgatgcggaagacgccgccgccgccgccgccgccgctgatgctgaggctgccggggctgggagcgcggcggctggagctacgactgcggagacgctccacggcccagcccatcgggcggcggcggctcggcgcctcgggtcgggggctcagaaggcggctgcccgggccgagccggggatagcagctcgggacatcttcctggctgaccccggagaaggaggggcgggaggagggtgcgggggcggggcgcgggggcccggggaggaggggggaggggagagagaagcgaggcaaaaaataaccgaggaaggaatccaggcaatccccagtccacccactccggaaaaaaaaaaaaagagacagttaaaaaaaaaaaatccacccaacgcacaccccctttaagacgcgaacggtttgcaaaggacgccccccccgggacgcagtggaagcttcaaattcctccgaggtccgggtcaggctggcatcttgcaaaaggagtgcgctcggcccattaaaaaaaaataaaaaataaaaaataaaaaaatatatatatatttaaaaataaagaaagacgaaacccaggtctgggtggggagggcaaaaaaaaaaaaaaaaaaaattaagtgcccttctgttttgctggagttcctagaccttaaaaatgctgaaagatctgtagctccaaaaataaaataaaataaaaacaaagaagatgaaagggaagggaaagaggagggaaggggagtaagacgctccagagggttcctaaggagtcttcacaccgcagggtccaggtttaaaaaaaaaaaaaaaaattttttttcttcctgaatcaccaacggctgcctcttctgctcccggaggaagtgtgagtgtgtatgtgcgcacagcgtttcgctcaatggtgcctcatcttggggttaaattgcagcagtgaaatcctgaaaattcccaacagggggaaaagagagagagagagaggtatgcgccctccgcttagccactcaatagctgcccctggatgcggcaatgcctctccaccctccaaatccctccacctcctccttctctaggttttgctaaaataagactggtgtggagggttgcgggtagaagaaggtaaagaggaaaaaaaaatgggcgcaaaggtctgaaccactggccagcaaacggaaaaggggagcaattgatgagtttaacagtagaaggacccacccagagtgtcgacacatgagggcccgcgaccaatcgtggaggctcgtggaggcgcgggggtaccgggctcagcggagtttgtgggggagagaggggagcgtcgcatggttgggaggcagggaggggggaattggggtgcttcctcctcccctgggaggaaagcctgttttccaccccgttccatttcggttgcagacagccggacgctccccagcatcttgcaaggagaaggcaggatggaggcaggaaaaaaacttaaaagacagaaaagagaaggggatttgtgtctagaggtgcgattcgtcagtctctaaacaaatttgctctgtttagcaaaagaccatttttgaaagtggagagagtggtttggggttacttctgtgaacgtttcaaatcacaaggactcctgcaagttggaattaaaggtttattctaccttggagaccccagaggtgacaagtctgaactcccaggaggaaataattaaccaggtcctagttggctggataggggttctgggtggtatagtttgcttgatactcacgtctctccagaaccactttgattacttcccattctgctttttgtgtggtgaaattcaataagcacaaagaaaaatgcataaaacataaaggtacggagttaagaaattggtctgaaatgaacactcatgaaatcaagtctagggctagaaatggaacatcaccacctctgcagaaccccctttgccaacacgcttacacagccccttattccagcaataatcgctacctgactttatggtattcatatcttgcttttttaaaaaaagtttgactaccttattatgcgttcctaaccaatacaattttactttgcttcttttgggcttttatataaatggaataatcatatagtatatattctacagtttcttgtttcttcggttcaacattatgtctttaagattcatctggcagggcacggtgtctgcgcctgtaatcccagcactttgggaggcagagcatgaggattgcttgaggccaggggtttgagacaagcctgggcaatatagcaagaccctgtctctccaaaaaccttttttaaaataaaaattaaccaggcatggtgatgtgaacctagtcccagctacttaggaggctgagatgggaagatcccttgagtccaggatgttgcagtgagccaagatcaaaccactgccctccagcctgggcaacaaagtgagactctgtcaaacaaaacaaaacaaaacaaaaacaaacaaacaaaaaaaacaagattcatacatcctaatctgtttcgaattttagaaaaattcacctgtttgttgtcacacatggctgtgattcattcactttcactgctgtatagtatttcatcaagagaatatgccacaatttgtttatccatcatcttgttgatgggtatctgttttttttccagttggggctattaaacattactgcctcaggtacctttggtgcagataagaatgcatgtctctaggaatagccttaggtgtggaatgtctgggtccacaaggtattcatatcttcaagcttataagatgtcatcaaactgtcttgcaaattcaatgtaccaagaaaccattgaattttcatggagcttgtatacgcagaaaggccaaatggagaggaatgggaaaaggatgaaaaaggcaaatattctttcaagccttagctagttaaatcctagttaattcccttcccccctcgccaccccacacacacatatcaatattcgagttcttttggaacactctggaaagatgatatgtctttatataaagtccccgttctgtgccaatgcaccaactattatacattgccccatagcactttcaagattttctaacttgtcacgatatggatgaaatgattaaaccaagagtgattggaattgcaaggagatagaattgtgtgggattcagggagaaggaggggcttttaaggcgctcaccaaatatcagtgatttttgtacttgacattgtttcagatataaaaggtgaacagcaactaatatgaaacaagaagcgagcccatgtgttcagatgggaagaaccagtcatatgagaggagctgagttgaacttatcatttgttctgatggacctctctgagaagattattcagttttagagcaggagcattacctgcatagatctgtgaagaccccagagtttttcaggaaagagtgacatctcactgatggagctcctgccagggtaaatctcccactgagtcttcacagcagccccgtggaacagatgcaaacactgagggtgagggagacttaaaaactttcccaaggtcactaacgtggatctgaacccatttctgactcttgtattctgttggacagaggggaatttggtacaaccactttggaaaaccgttggctgggtgcagtggctcacatctgtaatcctagtattttggtgggcagaggcaggaggactgcttgagcccaggagttcaagagcagcctgggcaacatagtgagaccctgcctctacaaaaggaaggaaggaaggaagggagggagggagggagggagggaggggggagggaaagaaagagagaaagaaaagagaagaaagagagaaagaaaagaaagagaaagaaagaaaagaaaaaagaaaagaaaaggtcaggaaataaataaattagttgagcatggtggtgcatgcctatagtcccagctactggggaggccaaagtgggaggattgtgtgagcccaggagtttgaggctgcaatgagccaagatcatgcactccagtgtgggagacagtcaagtctcaaaaaacaaacaacgacaacaaacacataaaaagaaaaactttttggtcatttctattaacatggccatttgagtatcctatgacccaacaatgtcactcctgggtatacacccaggagaaatgaggatatatgccctagaatgtgcagcactattcatacttgctaaaagttggaaatttccaaaataccgtaatggataaatacactgtagaacatggaattttatgcagcaataagaaaggacaatatggagctacacacaggtgcatggatgaattttacaaactccatgctgaacccaagaagacagacacagaacagaacatggtgtataattcctgttatataaagtttaaaaaaaaatggtgcacacctgtagtcccaggtatcctgattcccagctactctggaggccaagacaggaggatggcttgagcccaggaattcgaggcttgcagtgagctacatgatctgtgctccagcccgggcgacagagtgagacccaatctcttcttttaaaaaattaaataagtaaataataacattaaaaaatgagcaacactgatcacctttagaagtcaaaggagtagtcgctttgagggtaaagggatacattctggaagcatctccatctgggtgacagtggcatgggtgtgctcactttttaagttttgttcattttgtaccttttcactgagctgcacgtgactgatttgtgcagttttgtgtgtgctgcctacttaaataaaaaatatttgtaggctgggcatggtggctcaagactataatcccagcactttgggaggccaaggtgggcagatcacctgaggccaggagttcgagaccagcctggccaacatggtaaaaccctgtctctacttaaaatgcaaaaattagccgggcatgctggtgcatgcctgtaatcccagctactcgggaggctgaggcaagagaatcacttgaatccaggaggcggaggttgcagtgagctgagatcatgccactgcactccaacctgggtgacagagtgagactctgtctcaaaaaaaaaaaaaaaaattcgtgatgctcctgaagtacagcccaagcagcaccacttgtcatgatgatttgtgattgttctctttgcacactttgaccatgaagcccctatacaacaaaatcagacatctttactggaggacaaagaacagtcctccaggatgccccaaaccgtgcctaggcagcagagaagctggctgtgtacagaactgccggcaaagtgttgtgaacattcagattcctgagccatcccacactctcttttatttattcagcatgtccctggggtatagccagttttggcaaccacagctctggaagggggcaaactcaccatctctttcttggcattctctagtgttatcaaaggaggtgctgttggcattttcggtgcaacacttgttgctcttcagggctgtcctgtgcattgcggattgtttagccttcttggcaaatgcccactaaatgtcagtagcatccctagtcatgtgataaccagacatacccacatacatttgcaaacacctcctctcacctgccatcaaggtgacagaagagtctacactttcctctcaccaaatggcatttccaaagtttgcctgactacgaagtttggtgtgctggggttctcctctccttcctaggaatcttctcaagtccttcaacccccaattgctcaatacctcttttccagaaagaacttaactcatttactataaagtgtggcagggctccatgtgcattatcttatagattcactttgcagacataacatttctgtagccaaaggaatgaatctctaacaccagaatcttacctatcacctagcaaatgggaatggatgggcaagaagtcattgcagcctcctcaaatgactgtagtaggtagttcctggacccccactaatacaaattactaatgttgaccaggtagaaagatttagaatgttattagcgttgcagacagaagcagtttaacagcaggcagccagaaaccagccccaaccattggttctaatctttaacacatctgccagctggaggtttaatttatcaatcagcagcagcattactatactggctttaagaatgttattcaattgaacggggctagcatctttgaaataaatgccccaaataaataactgcaaatcgcattcatttgactgctaaaacaattatcagcaaatctagtcatgttgagttgcaaaaatggatcggccaaaagacatttggtctctgccttctggtctggatacccatggggaatgagtatcaagatctttgggaggtggaggataaaaatgacaaagccaaatttgatcatccagacatctacgggtcatgatgtaggcacccaagagtgaattcagagacggaatgtggctgcgactttgggcattacattgcatagcagcatgtgctctgcaagcttccaaaaacgaatgaggcaaagcctaattctggacacagacctggtttcaaatcctagctctcgaaattcctagtagtgtgcatttggaaaggtgcttcccctctctcaacttcagcttcctcaataaaatgaagacaagactccttaccctacaggttgctataaggatgaattaagatcaagcagaggccaggtgtgatggctcatgaccataatcccagcactttgggaggctgaggtgggtgcatcacttgagcctaggagttcgagaccagcctgggcgacatggtgaaaccccatatctactaaaaatacaaaaattatcccggcatggtagcacacgcctgtagtcccagctactcagctactcaggaggctgaggtgggaggatcacctgaacctggaaggttgaggctgcagtgagctgtgatcatgtcactgcattctagcctaggtgatggggtgagaccctgtctcaaaaagaaaacagacaaacaaacaaacaaaaatcaagcagataagccctcagcataatgactagcatacatattatataagaattcatggtaagtagatttttaaaaaatcaccatagtcggccgggtgcggtggctcatgcctgtaatcccagctcttagggaggccgacgtgggcagatcacgaggtcaggagatcgagaccatcctggctaacacagtgaaaccctgtctctactaaaaatacaaaaaattagccgggcgaggtggtgggcgcctgtagtcccagctactcgggaggctgaggcaggagaatggcatgaacccgggagatggagcttgcagcgagccaagatcatgccactgcactccagcctgggcgacagagcgagactccgtctcaaaaaaaaaaaaaaattcaccatagtcaatcttccagacctgaaatttgtgaatatcactgactaagattgattaaatattaccttatttttaacttcttaaataaacattttattttggcataattttagatttacagaaagtttgaaaacgtagtacaagagagttatcattatgcccttcacccagcttcctctaatattgacttttttttttctttgagacaggctctcactctgttgtacaggctggagtgcagtggcacaatcacggctcactgcagcctcgacttcctgggttcaagcgatcctcccactgcagcctcctgagtagctgagtagctgagactacaggcatgtgctaccatgctccgataatttttgtatttttagtaggtatggggtatcaccatattgcccaggctggtctctaacttctgggctcaagcgatgcacccacctcggcctcccaaagtgccgggattatggtcatgaaccatcacacctggcctctgcttgatcttaattcatccctacagcaacctgtagggtaagaagccttgtcttcatccctagtagctgagaccacaggcacaaaacaccataccaaactaatttttttttctttttttttttctttttttgagacggagtcttgctgtctcccaggctggagtgcagtggcgcgatctcggctcactgcaggctccgccccccagggtttatgccattctcctgcctcagcctcccgcgtagctgggattacaggcgcccgccacctcgccgggctaatttttttttgtatttttagtagagacggggtttcaccgtgttagccaggatggtcttgatctcctgacctcgtgatcctcccgcctcggcctcccaaagtgctgggattacaggcgtgagccaccgcgcccagccccaaactaatttttaattttttgtagagacagggtctcactctgttgtccaggctggtctcaaactcctgggctcaagcaatcctcccaccttggcctcccaaagtgttgggattacaggtgggagccactgtgcccagcctcattttgtctccttagtctcctctgatctgtttcttcgtttctcacaaccttaataatgtctaggagtactgatcaagtactttgtagaacgtccctcaccttgggtttgtctgttttcatgattaaactggaataatggatttgagagaagaccattgcacagaggtgcagtgccgttctctttgcatcagatcagggtgtaagatagttacatgacttaccattagtgatgttaacctcgatcccttggttaaggtggtgtctgccaagtttctccaccatcaagctactgtttttcccaatacctactctaccttctgaacagtcactaaggcctacccacatgaagtggaggaagagggataaatatccccttctggactgggaagtatctatccgtattctttagaattctttcataaggaggccgggcacagtagctcatgcctataattccagaactttgggaggctgaagcaggcagatcacttgagctgaggagttcgagaccagcctgagcaacatagtaaaatcccatctctacaaaaaataacaaaaattagcggggcatggtggcactcgcctgtagtcccagctactctggagtctgagataggaggatttcttgagcccaggagttcaaggctgtagtgagctatgatcttgccactgtactccagcctcagtgacagaataagaccgtatttctgaagaaaaaaaaaaagttatatatgtaggcaatttggcaactaccataaaaacatacaagaactatcaggggataatgaaagtttgagggataacagatcatttacatagtgtcagagtatcttcccaaagacaactgttaattttaatggtcaaaacagtaacctgatagtggagcaccctggcagataagcaagtgacgggcaaatcacgtgcctcctagaatgacataccaagaaggctgcaacatcgcttctaggaacttctgccaaaaatgcatgatttgaataattggtaaacaaccatgttcagattaaggggcactttatacaataagtattctttggaagtgttaatgtcgtgaagcccagataaagacagaacaactggtccagagtaaaggaaatgtgactgaccaaattcaacaagtgagccaggacctccttttgctacaaaggacgctattggaacaattggtgacatctgaataagatctgtagattacataataacagtgttcatatgctaatttcctaattttgatcattgtgctgtgcttatgtaagagaatgccctgttttgggaaacacactgaattatatagggttaaagggccatgatatctacaaattactctcagtggtcaacggttggggtaaggagagaaagagagagagagaggataaagtaaagtgtaagtggtaaaatgttaacatttgagaaacctggataagtgatataggcgacttctttgtaccagtcttacaactttttggtaaatctgaaatttcaacaaaataaaaagttaaaataaatgagtggctacaaaaattgcagaggcacaaggttcattcattctcctgactgtatggaacatctgccatgtgcccagtaattttgccagcacagaacaaggcagacagaatttcccgttgtcgtggagttgaatggagatgaggaataaatagagtaaataataaggaaaatacatagtatgtcagatgaggctaagtgctaaggagagaaacaaagcaggaaagggaatagagggtgctgccattgggaattagagtcaaatgcgtctctgaaacaggttttgttatgcaaaatagcagccccctgcctccctccatgtttcatatccccctcctgaaagatactcactatcaacacttttcgctgatttttttttcttttttgagaaggagtcttgctctgtcacccaggctgcagcgcagtggcacaatcttggctcactgcaacctccgcctcccaggttcaagtgattctcctgcctcaggctcccaagtagctaggcttataggcacccaccaccacacccggctagttttttgtatttttggtggagacggggttttgccatgttggccaggctggtctcaaattcctgacctcaagtgatctgccttcctcagcctcccaaagtgctggggttacaggcatgagcccctgaacctggccaccttttggctgattttaaaaatcattatggatatataatagttgtgcctatctatggggtatatgtgacattttgatacaagcatacaacgtgtaatgatcaaattagggtgactgggatatccaccacctcaagcatttaccatttcttggctattattaaaaagtcaaaaaataacagatgctgatgagcttgtggagaaaaaggaatgcttatacactgttgttgggagtgtaaattagttcaaccattgtggaagacagtgtggtgattcctcaaagacctaaaaacaaaaataccattacactcagcaatcccattactgggtatatacccaaaggaatataaattgttctattacaaagacacatgcacgcgtattcattgcagcgctattcacgatagcaaagacatggaatcaacctaaatgcccatcaacggtagactgaataaagaaaacatggtacataaatatcctggaatactatgcaaccataaaagaacaagatcgtgtgttttgcagggacatgaatggagctggaggccatgatccttagcaaactaatgcgggaacagaaaaccaaataccgcatgttctcacttataagtcggagctaaatgatgagaacacatggacacatagaggggaacaacacacactggggcctaattggagggtttagtgtgggaggagggagaggattaaaaatataactaatgggtactaggcttaagacctagtacccagattacaggcgtaatctgttacacctgtaatcacagcactttgggaggccaagaagggcggatcacctgaggtcaggagttcgagaccagcctggccaacatggtgaaaccccatctctactaaaaacacaaaaactagctgggagtggtgacaggtgcctgaaatcccagctactcaggaggccaaggcaggagaatcgcttgaacccgggaggcggagtttgcagtgagccgacacggtgccactgcactccagcctgggcaacagagtgagactctgccgcgaaaactaataataataatctgtacaacaaactccaggacacaaggtaacctatataacaatcttacacatataccccctgaacttaaaagtattttttaagaaaggatttaccatttctttgtgatgggaacataaattattgttacctatagtcaccctattgtgctgccaggcactagattttattcctcctatctaactctatttttgtacccattaatcatttcctctttattccaccctccccactacccttcccagcttttggtaactatcactctactctctacctccatgacttcttttttttttttttttttttaagctcccacatatgaatgacagcatgcgatatttgtgtttctgtgcctggttccctttagctgattattttgctatttactaccatattatttatattgggtttttgtttgtttgtttcagagatggaggtctcactctgttacccaggctggggtgcagtggtgcaatgtcagctcactgcagcctcaaactcctgggctcaagtaatcctcccacctcatcttcctgagtagctaggactactgatgcacacctccacacctggctaattttattatttgtttttgtagaggtagtgtcttgttgtgttgcccaggctggtctcgaactcctagtctcaagcaatcctcctgcctcagcctcccaaagcactgggattacaagtatgagccaccacaccaagccccacatcgttcattcacttacttctttctacttttaaatttttcagttttagtcattatttatttgttccaacactattattttattcaactaatatttctcaaactgaccacatactatgcgtagcatactatgccagccactacagataatatagagaagcattaactatcaaagagcttatagttaggttgggaaaacaagtcgtacacttgtgaatatttaagtagtattaagaaatagccaacagcaatacccaaggatattataatgaaagcaacaaagaagtatcctgtctgggtgttgtagcactttataggtattagctatagaaaaggaggattttgctaatttctccctccatccccctacacatggaactttccaaaacctgcgcatttgcccaatattgttctttcacaaagtgaggaagattcggtgtttatattatcatgtacaaggcaagttacagttatgtcatgaacaaactatagctactttttctttacaacatattgtttcccttgggacttatcattttttaatcttctttgtttggtacttattgcaaatttgaccccccaagtctcttaacaggtattcagttcattttatcatccagaagcagtctttcctgaagacttgtcacatggtctaatcaggactttccctggcatacagctttcatcctgggctctctctttatcatcatccaggagattccctttgcttctcattgttggatttcttaagtccagtgttctctgtttccctcttcttggtttactcccttgtttgggtgaagcacatcctctggtagcttcctaagaaaggatgcatgagaggttttccagttacctattgctgcataaaaaccagcccaaacttagtagcataaaacagcaacattcatttttattatcacattttgtgatttgggtggtcaactgggatcatctgagtggttttcacttggggtctttcatgcaaatacagtcagatggcgagagggactagggtcatctcaaaggcttcctcagtcacagggctggaacttaggctggaaagactcaaacaactgaggtttctcaagcatctatctccatttctatgtggtatctccacatggcatctccagtatggcaacttcaggatagctgaacttctcttatgccagttcaggactccaaaggcacatgtctcaagggagagagccaggcagaagctgcatctccttttatgagctaaccttggaagtcacaaagcatcactccttccctactctattagttgaatcagtcacaaaggttcacccaggttcaaagggagagaatatagattccaatcctttatggggaagtgataaaattctaagcaagtgtaaaatgggagccattgtgcagccatttttgaacagtctaatctgtctcaggaagtaaatattggagacttctatgtatgaaatgctattgttttagctttatacctcattggtagtttggctgggtatagaattctggtttggagatcattttacttcaaaaatgtgaagtattgctccaacgtattctcaattccagtattgctgttgggaagtttgaagcattcttactcctgatttcttgtatatgacctcattttttttctctagtagcttttagaatctttttccattgtgttctaaaattttattatgatgtaagttagtttaggtctattttcagtcattgtactgggcacttagtatgatgattgttaccccctttttttagagacaaggtcttactttgtcacataggctggagtgcagtggtgtgatcatagcttattacagcctcgaactcttgggctcaaaacagtcctcctaccgcaggctcctgaggactataggagtgtgccaccacacccagctaagattctcacccttttttcatgattctcttttaaacttattatttagatgttggactttctggactgattctcttatctgttcctttccttctattttgtatttccattgtgtcttaatcttctttttgagagatttctctaattttatctttccaccttttgttcagttttttatttatgcttttatattttttaatttcaagaggcttttggtattgctataattgttctctgagtgttccttttccatagtattctgccaacagccacaagtttaagcttgaaatcacatcttcccccagtcaagccttaagatgagaacgaagccccagttgataccttgattgcagcctcaagagagaccctgaaactgctgcaccctggttcctgactcacataaactgtgaaataaatgttgcttaaagctgccaaggctttggtaaattgttacacagcaatagataatacattaagtctccatatttcttatcttctcttcctgaaataaaatagccaatttttctcctttctggatctcaaaaagatttattctctgagacaggcattagagctgttcaccaaatatttccagttctccatatacaggcatgtgtaagatgtaagctggcatttcctggcccccttgtggtctgctggggtcatgtgactaattctgaccaatgagttctcagtggaaatgaaacatgtcactcccaggttgaagcatttaataaccaatacaaatctctctaatgttgcagtgtccaaggcagtagccacatgtggctatcaaaattaaacaacatttaaaatcctgttgttcagtggtacaagccatatttctagtcctcaaaagctacatgtatctagtagctactttattaaacattggagatagggaacatttttggaaagttctattgaacttttgaaagtggtccacggcagtgctctacaccacttttttcttctgcataggaactggcaaagctccaggtggcaaacgctccttaagactagctccagagtgaggacaacatgcaacataagtgactctttagctttttcttttattgtggaaaaatatgcatcatagccgggtacagtggctcatgcctgtaatcccaggactttgggaggccaaggtgggtagatcacctgaaatcaggagttcgagaccagcctggccaacatggtgaaatcccgtttctactaaaaatacaaaaacttagctgggagtggtggcgggcacctgtaagcccagctactggggaggctgaggcagaagaatcacttgaaccagggaggtggaggttgcagtgagccgaggttgctccattgcactccagcctgggcaatcaaagcgaaactctgtctcaaaaaatatatatgcataataaaaacttgatcattttaaccatttttaaggtgtacgtttcagtggcattaagtacattcacatagatgtgtaaccgtcaccatgattcgtgtccagaattttttcatcttcccaaactgaaactctgtccccattaaacactaacttcccattccctctcccccagcccctggcaaccactcttctactttctgtccctatgaatttaaccactctagggaccccatataaacagaatcatacagtatttgtcttcctgtgactggctgatttcacttagcattatgtcctcaaggttcattcatgtcgtagcatgtgtcataatttcattccttttttaaggctgaataatattccttcatatggatatacaacacaatgcttatccattcacctgttgacacacacttgtgttgcttccaccttttggttattgtgaataccgctgctatgaaatggatgtacaaaggaacatctgtttgagcccctgctttcatttctttgaggtttacacccagaagtaaaattgctggattatacattaactttatatttgagtttttgaggaatcaccataccattttctgcagcggctgcagagtccttagctttgagaagtacatattaaaatatttgcagatgaaatcatacgatgtctgagatttcctttaacagggttaaacacaacccagggttatgttagagcaaattaaaggtttgcttcaatttgcaaattaaggttatgtttaagtttgggctagagaaatacaagatgtgttatgagttgataattattgaagatgggttataggaattgggtgggatatcattctattttctcttctttcatatgtgtttgaacttttccaaaagaaaataaatttacttttcatataaagtgcttgaagtattcttaattcacattgagacaagggcctcacacttaattatggaaacaaaagtactcaagcttactatattcttaggcaattacaaattatattcagcatctaacccctctggtaagtcaggagcttgattaaatgcttagttatatattcatgtgtatcctaagaagttagcaagggaaatttaatcaaatgagctacacctgcttatggaaatgcagatcttagtttttcttttttcttttttttttttgagacagagtctcactctgtcgcccaggcaggagtgcaacggcacggtctcggctcactgcaacctccacctcctgggttcaagcaattctcctgcctcagcctcctgaatagctgggattacaggcgcccaccaccacgcccggctagtttctgtgtttttagtagaaacagggtttcaccatgttgctcaggctggtcttgaactcctgaccttgtgatcctcccgcctcagcctcccaaagtactgggattacaggcatgagccaccgcgcccggctggtttttcttgagtaagaaccgagcaaggtgtccccaggttgcaaaataacaagttttaccacacctggagataaagttaccaacgataggatcaagtgcactatttcacctagaaagcttgagaaaaattatcagcttcatctgttcattcattcatttgacatatgttgattatgcatttattctataccagatcctatcccaggcacatccattaatagagcaaataatttcctgttcttaggaaactcactgtttagggcagagaaatcagacaaataaactcaggcagatttatcatctgtcaggtaaagatagtttttataagaaaaatggaggccaggtgtggtggttaacgcctgtaatcccagcactttgggaggccacggctggtggatcacttgaggccaggagttagaaatcagcctggccaacatggagaaactctgtctccactaaaaatacaaaaattagctggggatggtggtgcatgcctgtaatcccagctacttgggtggctgaggcatgagaattgcttgaacccaggaggcggaggttgtagtgagccaagatcacaccattgcactccagcctgggtgacagagcaagaccctgttgaaagaagaaaggaaggaaggaaggagagagagggaaggaaggaaggaaggaaggagagagggggaaggaaggaaggaaagggagagaaggaaggaataaaggaaggaaggagagagagggaaggaaggaaggaaagggagagagagaaggaaggaagaaaggaagggagggagggagggaagagagaaagaaagaagaaagaaagaaaaagaaaaaagaaaaagaaagaaagagaaaagaaaagagagaaagaaagaaagaaaaaaagaaaaagaaagaaagaaagaagcaggtaagggtcagagtgggagctattttgcaaaagactgctctaagaaggtgatatttgagcagagacatgaaggcaggaaaagacgtgctgctatctgaaggaagagcatcgcaggcacagggaacagcataggcagaggcctagatggaagatgcctggcatgcttgaagaacattaaggaggcttgtgtggctggagtggagagaataggacatgagggcagggaggtgatggggattatggggctggcattccatgttgggcctttattgttttaaaatgtaggttttattattattgttatctttttgagacaggtttttgctctattgcccaggctggatgccatggcatgatcatgggggagattcactgcagcctcaaccccctgggctcaagcaaacctcacacctcagcctcctgaattgctgggactacaggcgtgtgccaccatgcctggctaatttttccgggtttcttttgtagaaatagggatcttgttatgttgccagggctggtcttgaactcctggtctcaagcaatcttcccacttcagcttcccaaattgctgggattacaggcatgagccgctgcacccagcccagttttattattattcaggtatggcaaggccactagatcaggggatgactgccattgaaaagacagtttgttactcacaggtccaagaagaaggggcacgcccatgctatgcagggccacacagggaagcaccagggctgggccagggaccgagggaataaagaaaacatgtgggcaagagcctttattgtggtttccatgggaaggaatgagccaggcagggtgagggcttcggggcatgggagttgcccctcgttgtttggtacctggctctgagatcattagagcaggggaatagtgtcccagcatgtgagagcccaagaaaggagatggttgggggtgtagatctggattggttggtttgcatgtaaaaggctctttactatctagaaattgtctagctctgggagggggcatccttgtagggtcagcaaagccccacatatcagagaatcagaaatacatggttaagaccgggtacagtggctcatgcctgtaattccagcactttgggaggtggaggggggtgggtggatcactcaaggtcaggagttcgagaccagcctggccaacatggtgaaactctgtctgtacaaaaaatacaaaaattagcctggtgtgatggcgggtgcctgtggtcccagctacttgggaggctgaggcaggagaatctcttgaacctgggaggcagagcttgcagtgagctgagatcatgccactgcactccagcctgggtgagagtgagactacatctcaaaaaacaaacaaacgagcaaaaagacatggttaatacgttgattttatgaaacttgcctcaaagatgtttcctcttgtaaaggcacattggggctcttaaaatgtttcgagttataggacctcaaagctcctgtctgtcttgttcactgcctcagcctcagccatgaagagaggtcaaaatagaaacccaacacctccagaagtgaaaagggcaagttgcagagaagtgcaggtgttgagctatctttatgaaagaaagagacagaaatacatgaaaaaaagaaaaaccattttgctcatattctcaagaagaaacaaaagattagccagaaaccaatacaaattattttccaatggggagagagagagaatgaagctggggacacaggtagggggcatttgattctgatgcctccttagaaggagaatagcatgatttccccagaaaatggagacttggtccttttattttcttctgttttgcccaacgactaaaaaagagcttgtatgtatccggggaagacaacagagaatgtggtaagagagttaggcttggtgacaacaagaatgggagcacacgcacatgtttgcaaggttacacataaatatatgcatacatctgtgatctccttccatagctgttctgccttttccgtcactgaaataacaactaaatcatctcatgtcccatatggcagccagactgtcacaaagttaatggacataaagttcacaagggcttgtggtacaaaaagtaaactttttgaattataaggaagtaggtactacactggtgcagcaaacactgtccagccatgccctgaccacttgagtgcatgcaggtctgacttccccctgccagcccccagggcattttctctggctatcaaagtgtccactcagcagtctgtggtgttagagaattaatactcccatcctttaacttatgatggatgggagttgatggatcaataccccagctccctcaccactagcatgcaacaacgctgaggaatgtgctctctgctgcctcccagaggtccccactggtaattgagacccagttgctcatggtggtaacttgcctgatgactcacttatcactgggtcttccctttcctacttttctgccagtgtgttttgggatctcctccagaagcattcaaatctctgcttctggatctgcttcttgggagttggggggcgggattcaaactaagacaatggagttggacagattctgttagctacttcaaaatatttaggcagaaggaaggaacttcagggcattcagggcagttttcctggatcctccactgaacttccttcctttcattttccttccttccttccttccttccatttcttcctcttgtttcttcctctcattctcctttctttctctctctttccttccttccttccagctcaagacatggggctgcttctgctggggcaatacttaatggtgttacatacaaaggttttttttccatattgggggaaatatttttaggaaggacttccttttttccttccttccttcctcccttccttccttccttcctttctccttccttccttcatcaaaaaagagtatgaaaggtgtcttagtccattagtgttgctataaaggaatacctgaggctgggcaatttataaagaaaagaggtttgtttggtcaacagtcctgcaggctgtacaagaaagttggtacaggcatctgcctctggtgagggcctcaggctgcttccatcatggtagaaggtgaaagggagctggcatgtacagagaccacatgatgacagaggaagcaagagagagcagagagaagtgccagagtcttttgaacaaccagctcttgggggaattaatagagcaagaacttactcattactgagaggaaaataccaagcccttcatgagtgatctgcccccataacccaaacacctcccactagaccccatctccaacattgagaattaaatttcaacatgagatttggaggggtcaaatatccagaccaaaagcaaagggttttgtatgacaaaacaagcatatatcaggtacccccgatatgtttactacctgagccttattgtgtcaccaaaaaataccagaaatactcgtcaaagatttagacccacacacactatccaaaacctagccataagccacatgtggccactgagtgcttgaaatgtgactcatctgaattgagatcagtaaagcataaaatacacaccagatattgaagatttttgtttctgtttgtttgtttgttgagacaggttctcactctgtcgcccaggctggagtgcagtggcgtgatcatggcacactgcagccttgacctcctggatttaggagatcctcctgcctcagcctccctcgtagctgggactacaggtgcataccactatgcccagctaactttttgtagagatggggttttgtcatgttgtccaggctggtctggaactcctgaactcaagcaatctgcctgtcttggcctcccaaagtgctaggattacagacatgagccactgtgcccaacctgaagacttaatgtttttaaaagtctgaaatatctcaatagtttatatgttcatctcatgtggaagtaacattttcaatatattgggttaaaaatatattattaaaactagcttcacctgtttcttattaccatttctaacgaggctacctgaaaatttaacattacatatgtgatccttgtatttcttttgttttcttttctttcttgtttttttttttttagagacagggtctcactttgttgcccaggctggaacacaacggcacaatcatagctcactgcagctttgaattcctggcctcaagaaatcctcccacctcagcctcccaaagacttgggattacagggatgaaccacagcaccctgaccccttgttgtatttctgttggacagtgcttatcggatgactaccaagccctgcacttctttttgtttgtttgtttgagatggagtcttgctctgtcacccaggctggagtgcggcagtatgctctcggctcattgcaaccactgcctcccaggttcaagcaattctcctgcctcagcctcccgagtagctggggttacaggcacctgccaccacacctggctaagttttgtatttttagtagagttggtgtttcaccatgttggccaggctggtcttgaactcctggcctcaagtgatccaccccctaccttggcctaccaaagtgctgggattacagacatgagccaccgtgcttggcttcttttttcttttttctttagagacagggtttcactgttgctcaggctggaacacagtggcacgatcatagctcactgcagccttgaattcctggcctcaagcaatcctcccgtctcagcctcccaaagagctgggattataggcatgagccacagcaccctgatcccttgttgtatttctgttggagagtgcttgcctggatggctaccccagccctgcacttctgagctccatgaccccttagaaatggtttcctcatctagaaacaatgcaacagcaacaaagaataataataccatgctaacatccatgctgggttctacttatgtgagtttgaactatcatttcacctctttgagcctcagtttcctcacctgcaaaatgaggatgaggacaggacacaccccatgggatcacgaaaggatggaacaatgccctccctctatatgtgacaggccaagcacagggtagtggaaaataaacactgacttcattggcaatcctctttactgagtgcagttgaaattgcctcttacaatgcaaatcaaaaccacagtgagataccatctcacgccagccagaatggcaattattaaaaaatcaggaaacaatagatgctggcgaggctgtggagaaatagtaacgcttttacaccgttgatgggagtgtaaattagctcaaccattgtggaagactgtgacgattcctcaaggatctagaaccagaactatcatttgccgcagcaatcccattactggctatatacccaaaggattataaatcattttactataaagacacatgcacacatatgttttttgcagcactatttacaatagcaaagacttggaaccaacccaaatgcccatcaatgatagactagataaataaaatgtggcacatacacaccatggaatactatacagccataaaaaagaatgagatcatgtcctttgcagggccatggatgaaactggaagccatcattctcagcaaactaacacaggaatagaaaacgaaacatcacatgttctcactcataaatgggagctgaataatgagaacacatggacacagggaaggcaacatcacacactggggcctgtcaggcagtggtggggaaggggagggagagcattaggacaaatacctagcgcatgcggggcttaaaacctagatgatgggttgatgggtgcagcaaaccaccatggcacaagtacacctatgtaacaaaccggcacattctgcacatgtatcctggaacttacggtaaaataaaaaataataataatacaattaaaagttaaaaaaaaaaaaagaaattgcttctcgtgtccaggaaagcacctggtgctccagaaacagagaaggcaaaaacagaaaaagacccactggaggccaggcgcggtggctcacgcctgtaatcccaacactttgggaggccaaggcgggtggatcatgaggtcaggagtttgagaccagcctggccaacatagtgaaaccccatctatactaaaaatacaaaaattacagctaggtgtagtggcacgcacctgtagtcccagctactcaagagactgaggcaggagaatcatttgaacccaggaggtgaaggttgcgatgagccgagatcttgccattgcactccagcctggatgacagagtgtgactccgtctcaaaaaaaaaaaaaaaaaaaaaaagacccactggagacacaatcaaataaaggtaatagaaaaagagaccccagcatcacttattggtgggagtaaaaatttcacctaagaattacatgtggagaaaaacatgaacgcatttgtgttcagactgttcaaatgcatgttgtcccacagagagcttaataggttgacttggcagaccattaaatctcgcttctgtgtctcttgccttcccttccttggcgtcgtctgtgtcttttgttgtggaaaaagctttcatcccatgccgacagaaatcactcaactctcacctgaggcactcatttaagagcatgcctcagaggattgtgtgttccttggacacgtgtcaaaatatcacatgccttccataaatatgtacaattattatgtatccatagaaaaaaggaaattaagaggaacaaatatagagattaatactatttgcatattaaatgatgatctaattataaaacataggaagttaaataaaaatattagaaacaatgagataattccataaggtggctagttataaaattaatataaaaattggatcgggcacagtggctcatccttgtaatcccagcgctttgggaggccaaggtgggagaattgcttgagaccaggagttcaagaccagcctagtcaacatagcagagatcctgtttctaaaaaaaaaaaaaattatattacaagggcatagtggtgcacacctgtagtccagctacgcaggaggctgaggcaggaggatgaggctgcagtgagctacgatgatgacactgcattccagcctggccaacagggcaagaccttgtctcaaaaaaaaaaccaaaaaattattataaaaattaatgctgcccgggcacggtggctcatgcctgtaatcccagcactttgggaggccaaggcgggcggatcacctgaggtcaggcattcgagacaggcctgaccaatatggcaaaaccccgtctctactaaaaatacaaaaattagctgggcatggtggtgcatgcctgtaatcccagctacttgggatggtgaggcaggagaacagcttgaacccaagaggtggaggttgcagtgagccgagatcgcaccattgcactccagcctgggtgacagagtgagactctgtctcaaaaataataataataataataactatatatgatgaccacttactgaataaaatggggaaaaaagtctcatttacaaaagcaaaccaagataaagtactgtattgaaaataaacttggccgggcacagtggctcacacctgtagtcccagcactttgggaggccgaggtgggcagatcacctgaggtcaggagttcaggaccagcctggccaacatggtgaaaccccatctctactaaaaatgcaaaaaaaattagccagttgtggttgtgcgtgcctgtaatcctagctactctggaggcagaggctggagaattgcttgaacccaggagatggaggttgcagtgagtcgagattgcgccactggactccagcctgggccacagggcaagactccatctcaaaaataataaaataataataatgctaactatatatgatgaccactcagtgaataaaacggggggaaatctcatttacaaaagcaaaccaggataaagtactgtattgaaaataaacttatggagtgggaagaacccttatgaaaagaattttaaaattctactgaagaatgtggtataatcctccaatacacgaaaataaatgcagttattgagaggaaaacaatactgcataaaaataaattctgtccaagttactctacgagtaaaagtgttatttgttcccaaatcaagaaaaaaccaagtcaccttgggggaccagaatcaggggaaagagatttaactgggcttaaagatgtgttacaaggcggcacggcatatgttggagttgtatgaccttgggcaagctgctcaacctctctggcctcagcgtgctccttagtaaaacagggaaagtgcagtgttcttgtgattggtgattgtgtggattaaagtcatgttagataggctcacagcctgggtggcggtgttggtaattttcactgcctccaacttacagtcacgtattatcaccaaagtgactcccctcctcccacatgagtctgagagggctcctggtatatcaaaaccatgtgaaaagcaatcgtgtcctttggacattttagtgcattagctcccactgaatgtaacaattgtggccagtgtggtggctctcatctgtaaactcagagatctgagaggccaaggcaggaggattgcttgtgcctaggagttcaaaaccagcctgggcaacatagcaagaccccacccaaaaaaatagccaggcatggtggcacatgcctgtggcctcatactttggaggctaaggtgggaggattgcttgagcccaggaggttgaggttgcagtgagttatgatcgtaccactgtacttcagcctgggtgacagagcaagactccatctcaaacaaacaaacaaacaaacagtgagtctgaaagttttctttaaatttccttgtttttatttttttaagagatagggtctcactttgtcacccaggctggagtgcagtggtacgatcatagctcactgcagccttgaattcctgggttcaagcctcagcttcccaaagcactaggactaaagtgtgaaccactgcatccagccataaatcaaatttctttcatttgttttaaaaatttttgcaaaagtaaagtaatttttattttaaaatattttaggctgggcaccgtggctcatgcccataatcccagcactttgggaggctgaggtgggcagatcacctgagtcaggaattcgagactagcctggccaacatagtaaaaccccgtctctactaaaaatacaaaaattagcaggcgtggtggcgcacacctataatcccagctactcgggagactgaggcatgagaatcacttgaactcaagaggtggaggttgcagtgagccgagatcgcgccactccagcctgggcgacagagtgagacagtctcaaaaaaagaaaaagcacaatattttaaagccactctcccatgacttctccaatacaaatactgggtattttattgtatttctgtctggttctccccctctaggtttttatttttcatacacatgtaattataatttaaagattttatatacaatagttttccatcatctgagtagtcactatacggctcattatccaagtatttacaccattatgtgtttagggaagcaaaagtcatcctaacataaaaattgtcactaatgaactgacaacttgacaattatccccctcaaccatccatttcggagtaatacaaatattgctttggaagccatcagatcagtgtgtttgtcactgtttatctctgattgttgatggttgcttgaaactcaatgacacaattcaaaactatgtgaaacaactgcagagtgaacattgaaaatctttgcaaggggcagcaggatttcatgaagtcaatgaaagtgatgttggagagctacttgcaatgcagagaataacattgttaagtgaggaacttgcagtgagactggttaacaacagaaaaggagatgacaggtggatgatagtgatgaacactttgaaataaaatgaatgggctgggagcggtggcttatgcctgtaatcctagcactttgggaggctgaggcgggcagatcacctgaggtcagaagttcaagaccagcctggccaacatggcgaaaccccgtctctactaacaatgcaagaaaagtagccaggcatggtggcaggtgcctgtaatcccagctactcgggaggctgaggcaggagaatcgctggaacctgggaggcagaggttgcagtgagctgagatcacgctactgcactccagcctgggcgggggagcgagactctgtctcaaataaataaataaataaataaatggaatgaatggatgatcaaatggtttaaaaagccctctgaggcaccttgttttggcccacaaaatgattcccaacaaagttcaagattacataactgcctttaggtttttgaggaatcaccacactgtcttccacaatagttgaactaatttacattcccaccaaaagtgtaaaagcattcctttttctcccattaccgggtacatgcccaaaggaatataaattattctattgtaaagacacatgcatgtgtatgtttattgcagcaatattcacaattgcaaagacatggaaccaacctaaatgcccatcaatgacagactggataaagaaaatgtggtacatatataccatggaatactatgcaaccatagaaaggaacaagatcatgtcctttgcagggatgtggatggagctggaagccattatcctcagcaaactaacacaggaacagaaaaccaaataccgcatgttctcacttaaaagcgggagctgaatgatgagaacacatggacacatagaggggaacaacacacactggggcctttttgaaggtggggggtgggagggagagcatcaggaagaagagctaatggatgctgggcttaatatctaggtgatggtatgatctgtgcagcaaaccaccatggcacatgtttacctatgtaacaaacctgcacatgtaccctggaacttaaaagttggggaaaaaaattacaccactgaagtcaaagatgaaatgaaaggggttctgttgttctaccatataattttgttgggaaataaggcacgcttgaatacagtcatccctaagtatccatgagggattggttctaggaacccccaacggataacaaaatctacagatgctcaagtccctgatagaagatggcaccgtgtttgcatatagcctgtgcacatcctccagcacactttaattaattaattattcatttattttttgagacagggtctcactctgtcgcccaggctggagtgcagtggcaccatctcggctcactgcagcctcgacctcccaggctcaagtgatcctcccacctcagcctccccagtagctgggactaaaggtgtacactaccatgctcagctaattaaaaaaaaatatatatatacacatatatatattttgtagaaatatatatatacacatatatatattttgtagaaatatatatatacacatatatatattttgtagaaatatatatatacacatatatatattttgtagaaatatatatatacacatatatatattttgtagaaatatatatatacacatatatatattttgtagaaatatatatatacacatatatatattttgtagaaatatatatatacacatatatatattttgtagaaatatatatatacacatatatatattttgtagaaatatatatatacacatatatatattttgtagaaatatatatatacacatatatatattttgtagaaatatatatatacacatatatatattttgtagaaatatatatatacacatatatatattttgtagaaatatatatatacacatatatattttgtagaaatatatatatacacatatatttatatattttttgtagagataatcttactatgttgcccaggcaagtcttaaactcctggcctcaagcaatcctcctgtctcagcctcccaaagtgctaggattaaaggcatgagccactgcgcctagcccagtatgctttaagtcatctctagattaattataatacccaagatcatgtaaatgctatgtaaacagttgttgtattgcttagggaataatgacaagaaaaaagtctgtacatgttcagtacaggcacaaccatcgcaggcctaattacattttacatctgcaacttgttgaacccatggttggttgaacctgtggattcagtgtatagggctgactgtatcaacttttgattctttgttaattctaagaagctgatcatgtttggaattactatttaaactttgttgaacacaatttaaaaaattaactgaggcttagaaagtgtggcttcattttacaggacaaagtcccaattgcctctctctcctcacccccacacccggtgctccctgtgaaatttggattcctgtattcagtggattcagtttaagcagctttttccagtacttagtactctgaaatgaataggtttcctctagcactttcttacttaaaatcatattataaccaccattatctttgatggctacattcatttaatttatttacttattccttttttaatgaacttttaataatgtttctgatgagatgcttttaaaagcaataaggaaataagtaatgatatgtctttgtgcgtttagctgtgaggattttatcccacgtgtggaattactggattagatgcgaaattgcaacatttgtatggctcttgatacatatttctcagtgtctttccaaactggctgtagaaatgtaccctgccatcagaaacatttggagagatatttctactcctcacagattacgtatatttgttaaacaccactgtgggccaggcgctgttctaggcacctgggatacagcccagaatgagatgacctccaatagttgccctcatggaacagacagtcaaattcagaaaaatagacaacaaacaaataattgttcaatatgttagacatgatgtattatagaaatgtagggtggtgatacaagagctaagaagaaattatttaggcagatagggtatgagcgtcctcaataaggttttccttttcatgaaaagcagcccccaaattatttcttttctaacaaagagcagcctgtaaaattgagctgcagacatagacaagcaggctggaaacttgccaggtgaatgccggcagctgtgccaataggaaaaggctacctgggactaggcatgttcaaaatggcggcctcatcttcccttctctttgtcagccacgtgtacagtaaggagcagataacatggcaccagcgaggcaaagatcccatttgcataagattagggcgagccatccagcttccccatgtgctatgtaaacatcacacctggtccaaccaatccttgggccctatgcaaatcagacaccgccccctcaagcctgtctataaactggtgcactctgccatgggtgggaagtcccattcggaagcccctctcacacaagagagagagttattctcctttctctttcttttgcctattaaacctctactcctaaacccacttcttgtgtccgtgtcctcgatttccttggtgtgagaggacgaacttcgcagatttaccccagacaacaacaccgcttcagcgggatccagagaggatgatcagggaagcttccttggtaagataaaattcaagcagacacttgaaggcggcgaggaaggataccatcaaaaatccgtgggaagagcattctagcacgagggaacagctatgcgaaggctctggggcaggaatgtgctttgtgtgcaccgagaagtagatgggtgcagatcatgcagggtcttgtggaccacaggggggactttggctcctatcgtgagtgagggaggagctgtggaagattctgagcagaggaggggcgttacctggctcaggtgttcacaggtgccctctggccacgagagcagatgggaaagaaagcagaagctgggagggggaggaagaggaaaccacactgggttaggtggggggccgtgaccaggtgggtaccacggtgagttaattctggttatgttgagatggtaaagcagacaggtgtggcttatggattggaagtggaggatgcctggaggagaggagtcaagaatgtctcagggattttgacatgagcagtctgaggacacagctctgctatcagctgaggggaagaaaactggggcggggaagtgggagggtgggggtagtgttgggggaagataacaattcactcaccacttcccccttgaattatagaatcaccccacagcagtattcataaagaatgaaaatgcaaacatctattaataattattcgcaaatgctgcatattagccagtttagataaaccctgctctctgggaattttgccagaaaaaaatccccaaataagcttctacagctctcaaagccaataaaatgccatcagggagtagacggagaatggcaaagtcccttcctcatgtgagaatctgtttaatctaacattaccatgccttcatctacccttctgtaagacccaggattgtctgaacacaaagataaacataacagagctatagaaagacgtgaagtgagaaaacaaaataatcgtgggggataggatgtttggcaagactagatgaggacttctcaagctaggagatgattacacctaactagctccactaactagctgccgtagtggaactacgggcagttccactcttctttctctctttgctgcctaaccctcaccaatgctggatggattagaatctgtgtctctgcttccattgttgtttgcggccaccttgatcatacaaactgccctgctgtagtctattgtttatttactcatgcaacaaacaattattaagcttctactatgttgcaggcactgcactggatgcttgagatagagtgtttcggagaccacctgttacccacccacccattatcccctcataacttccctagctttcagaacccagcaataaaacagaactacatttcctgggcacttttgcagagagatgtggccacatgaacagttctggccaatcaaccataaggatgctgatctcaactgacctttgtcctttgaccttcttcctcctttctgtctgaagcactgatgtgatggctggagcagcagcagccatcctgagactgaccatgaggaaaagaccaagctgaccttggtcttggctgaacatccttgggccactgcagcatttttattttatatgcaaccaaataaaattttcgactgatgcacatgtatgttctgaaaaagttgtctttttattagcctgtttctccacataagacttcttgaggctgggtgcagtggctcacacctggaatctcagcactttgggaggccaaggcaggaggaacacttgaggccaggaatttgagaccagctgggcaacacagcgagaccctgcctctactaaaaacacaaaaattagctgggtttggtggcacacacctgtagtcccagcttctcaggaggctgaggtgggaggatcaattgagcccaggaggttgaagctgcagtgagctatgatcatgtcacgacactttatcctgggcaacagcacgagaccctgtctcaagggataaacaaataataaaagtaacagtaaaaaggaagacttcatgagtgcagaaaccaattttatttagcttcataagccctcaagaaatgtcagatgaattcatgaatgagtaaggtagcatgacttttataatttaaaacgcagcaggcccaggaagggcatcttcttcccctattcgctctctgcttgggtgccacatctctggcagtggctgatcccttccgtgatgacagctactgccagcagctcctccctcatcgttccagctgccactggctccaatgttgcaatttcttcaatccaaggattgtaggggcttcctgctattgctagcctctgggtgcccaacatcccacatgggttaactctgtccacacctctgtaaggaagtccttccttttcttttctttctttctttctttttatatatatatttatttatttattttgagacaggttctctctctgttgcccaggctggagtgcattgacatgatcacagcacactacatccttaaccttccagactcaggtgatcctcctgcctcagccccgccgagtagctgggactacaggcatatgccaccacgcctggctaatttttgatttttttgtagagatggggtctcactatgttgcccaggctggtctcaaactcctgggctcaagtgatccacccacctcagcctcccaaagtgctgggatcacaagcatgagccaccacacccagcaaagctcctccttaatgcctcttcctttgaaatatctgggggctggagagtgaactctgtttcctctgtagactctgagagacactccccaccaggtggtaagttcaagggcacagaacacatatccgctttactcactagtaccccggacccagcacaggttctgccatggagaagttgctcaatgaatatttatagaataactaacttcacttcccattaaataaaccagaataaaaataataaggtgatgccatttttgtctattaaattaacaaaaaatatatatatatttttgagacagggtcttgctctattgcccagggtggagtgtagtggtgcactcacggctaactgcagcctcaacttcccaggctcaagcaatcgtcccatctcagcctccatagaagctgggactacaggtgcgtgccaccacgtctggctaatttttgtatttttagtagatatggagtttccccacattggtcttcaactcctgggctcaggcaattttcccaccttggcctcccaaagtgtgagatcacaggcatgagccactgtgcctggcccaaaaaatgtttttaaaacaataaaacccaatgctggtctgtgtgcattgaaatgaatagacttcagcgttgctgttaaatgtgtaaattgatacaaccctttggaaaaaccatatatataagaaaccattaaaatagtactcatttttgactcagtaaaactactcctggaaatctaatacaaagaaatgaatcccagtgaagggaaaatgtatgtaaagatttgattgtagcattatgtataatgtcaaaatatacccaacagtaggttataaggaaaagacccttctataggcattaaaatgacagtatgggatggagggagggagggaagaaggaaagaagggagggagggagagagaaagggaaggaggaagggagagagggaagaaaaagaagaaagaaagaaaaggaaggaagagaaggaaagaaagaaaaagtaagggaggagggagggagaaaaggaggggagaaagggaaggaaaagaaagagaaaaaagaaagaaaaggaaggaaggaaagagagaggtgaaaggagggaaggatgggaggaaggaaggaaaaaatgaacaaaggaaggaaagaaggaacggggcaggaaaaagtgaatgggggtgcagtagtttcaattttacatagctgaggtcgagaaggtgactgtgagcagagacctgaaggaggtgaggcagaaattagtcacaagaataagaaaaaaaatgtaagaaagagatgttaacagttaggtattaacaactgtgtgtggactcattaataaatatctttgagcccctgatccatgctaaggatgcattagaggcaaaactggacatagtctttatcttttttttttttttgagacagcgtcttgctctgttgcccaggctggagtgcagtggcactatctcagctcactgcaacctccgcctcctgggttcaagtgatcctcatgcctcagcctccaaagtagctgggactacagctgtgtaccatcatgcccggctaatttttgtattttttgtagagacagggtttcaccatgttagccaggctggtctcaaactcctgacctcagatgatccacctgcctcagcctcccaaagttctgggattacaggcatgcaccaccatgcctggctaatttttgtagagatgggggtctcactatgttgcccaggtgggtctcgaactcctgagctcaagcgatctgccggcctcggcatcccaaagtgctgggattacaggcatgagccaccgtgagcggccagtccttatctttatactaactaaatgagaaaatcaataagagcgaattagaatgttgatgtgggtaatgaaagaaaggcatatgatgctagaaaaatatatactcagaggtattggggagagagacagatgcatgaatagaggtaaagggatacagagaaagaaaaagaaacaaagagatggagagagagggaaagagagaatgtggggaggaggggacagaaacaaggagagacagagacagagagagatgtcaatgaggtgaattatatttgggactctctgaattctcttttccacagctgaataataacagtaatagcccagtaattagtatacaactgctcaacctctctctcttgcctggagctggcaagaaaaataaccaatcgtactgaagaaaggaccaaggacttagggagaaattgaaagaaaaagcagcctagaaatcatgcattggagaaaaacagaatctgaaggttgtggcaaagcgaagagaccctgagattaggagggaaagtggatatgctttttcttaaaaaaagatatttctaaaggagtttctgatgttaaatgggatctcggcagaatgaaataacaaggcttttaactctaaagccctatccatcttcccagggaatgttcctgacccttcagcaccaaaagcaaacccttcgtacctgtgcttttccctccagttttggtacattgtggacataggtgttcgtttatccaaccaccctctctggtcccatttgtagcagagataatgctatggatctggcaaatcccattttcttttccttcctgggatacgtacagcaaagggacatattccagctctcactgaagttcgttgggccctgggactacattctggctaatggcatttaggtaaaagtgatgtgaaccacttctaagcctaacccatacaaaatgtccagcataattctctgtgtacaaattcagaagcaattaggggaaagcagaggcccttcctagacaatggcaaagccacaagatgggaggaccctgaatccctgcgtcactgcctggagaagagtctcccaggaagtacaaccattatggagaagtttggaggttcctcaaaaaactaaaaatagagccaccatatgatccagcaatcctgccgctgggtatatacccaaaagaaagaaaatagtatatcgaagagatatctgcactcccatgtttattgcagcactattcacaatagccaaaatttggaaacaactcaagtgtccatcaacagatgaatggataaagaaaatatggtacatatacacagtggagtactgctcagccataaaaaagaatgagatcctgtcatttgcaacaacatggatggaaccggaagtcattatgttaaggaaaataagccagggacagaaagacaaacttcgcatgttctcacttatttgtgggagttaaaaattaaaacaattgcactcatggagatagagagtagaatgatggttaccagaagctaagaaggggagtggatgggggtggaggaggaatgtttaataagtacaaaaaaatagaaaagaatgaataagatgtagtatttgatagtacaacagggtgactatagtcaatgataatttatttgtatatttaaaaataactaaaagagcataattggattgtaacacaaaggataaatgcttgaggtgaaagatacctcatttttccatatgtaattattacacattgcatgcctgtatcaaaatatcccatatatcatatatatatacacatatatatataatgtatacacacatatataatatatatatacacacatatatataatatatatatatacatatatataatatatatatataatatatatatatatactatgtacctacaaaaaattttttaaaaagagaaaagcctactgggagaaaacatctatctcggatagttgagtgaacaagaaggacactttcaccatgttcaacctctgagaattcagggtttatttgttatagcagctaatatcccttatcctatctaatacaccatccatcttggacagtagagtgagcaagaaggaaacgctcactgtgttcagccactgagagttcagggcttagctgtcacagcagctaaatcccttatcctgtataatacaccctttccataacagtgtgtgtagattttgagaagagtttacattccctccaattctgcttctaaacctttattttcctgcctttgagaaagaattcatactccttcaaggctcagaccatccatccagcatcttcaccacctcccatctctgccattgtcctctccaagctgtttcttgcctctgtctctttgcccttgcactcatctccacctggaatgccaaaggggcactgcagacaatgtgtgtttcaaccaaaatggacagagatgctgtttgctgctgcaggacagattaaaaactctttggaagcctcatacccatgactttggccttggagatactgctgtccagccactaggcaaaccaagcacacaagctgttaacccagttactaaggcagagagctgggagttacttttgactcctccctctccctcatcccactattctatcagtcaccaagatgtattgattctacatccagatacctctcaaatccatccactttcatcaccattgcttccatcaaattccaggccaccatcatctcttaggataaattccaattctgttaatgtggcccagaggtcctgtgtgatctggcccctgccccaaccccagcctcttccctctcagactctatattctaactgacttggactcctttcaattctttaaatgcaccatattcttttcctgcctttggacctttgagatactgctcccacagccaaaacactcctcttcttctttcccagctaaacttctactcattctctaggtttcagcttaaatgctcctttatccaagaagccttctttgagtttgttaaatggcattcgactctgtgattataaaccatgtcctgcatttagagcactgcatttacctgctagactggtaagctgaccagcagcgccaacatctgcattgttcattattgtgatttcagggtcaagcatggggcatgacatatagtaggtgcttactaaaatattgttgaataaattttaaaaatggatggatggacagatgatttgatggatggatagatgatttgatggatggatggatggatgagtgaatggatgatttaatggatgaatgattgggatagatgatttgatgaatggatggatgggtaaatgagtgaatggatgaatgaatggatggataaatgagtgaatgattgatggaaggatgaatggaagaacggatggctgaataaatttcttcaagatgctgagtgtgaatctgtgactccaaaagaaaccaaagataactatcatctggacaaccctaaaaccagaagttccatgagactacattcttgctcatctttgcttttgtggaccttgaattctctttgggagtgagtagataatggcaaggaagcaaagacaatagaaaacatacaaataaaccaggtggcaccagaagatgacacacaccacatgctctaaaggggtggcatttgatccaagaccccaggcacttaaaattaaaattaaacaagtgagaatgccaattccatgccaaaaatcaagccaaatgatcctcggaatgtgttgactggcaatgatagctgggatttaaaaatagacttatcaacctattatgcatgtcctgcctttgcttcagtaatcactttccccaggtcccaaggaaatacaaaatggcccttaaacagatgacaaggggaccattttcactcataataagagaagaccaattaaaattgtattgagatgccatttttcacctaccttatgggcaaaagcatgataacacacgctgctggcagggccgaggggcaccagacaatcacctgtatcgctgatgggagtggaaactggtacaatctccatggaggatcatttggcaaaattcaccaagattacccatatctttaccctttgacccagcaatccagtttctccaaatttatcccattgtctatgataccctgatatgtttttatctattttttttaattcatttttgaggcagccttgctttgttgcccaggctggagtgcagtggcacgatcatggctcactgcagccttgaacccctgggctcaaggtgatctgcccaccttagcctcccgaggagctaggactacaggtgcctgccagctaatttaaaaagaattttttttagagacggagtcttgctattactcagcctcccgagtagctgggattacgggcatgagccaccacacccagcaactgacatgttttaaaaagtgacatatgtgtggcccatacctgtgatttcagcactttgggaggctgaggtgggaggatttcttgagacccagagtttgagaccagcttgggcaacatagcaagaccccatctctacaaaaaacaaattttgcattggtagtcccagctacttgggaggctgaggcaggaggatcacctgagcccaggaggccaaggttttagtaagctatgattgcatcaccacactcctgcctaagtgacagagtgagatcctgtctcaaaaggaaaggaaaggaaaggaaatgaaaggaaaggaaaggaaaggaaaggaaaggaaaggaaaggaaaggaaaggaaaggaaaggaaaggagggcatatgtacaaagttactcattattagactgtatgtaatggcaggatattgcaaacaacccatgaatctatcaatagaggctggtttaataaattatggaccactacataaaaataataatcatagcctagacacatcacttacttcattcatgcctagcatgattctaaatgtgttatatgtaataattcataataaccatagcaggtgcactctaaccacttttctatgttataggtgaagacactgaagcacagagaggatcagtgacttgcccaagatcacacagcctggaagcagcaaatcaggtcagtgaggggagctggtcccttgaggggctggaagcaggcacaatgatgtagctataaaaggaagaagcccaagagagctgtttgggccaggcgtggtgactcatacctgtaatctcagcactttgggaggccaaggcaggcaaattgcttggggtcagaagttcgagaccagcctgaccaacatggcgaaaccttgtctctaccaaaagtacaaaaattagctgaggagggtgggtggtgtgtgcctgtagtcccagctactcgggaggctgaggcaggaggatcgcttgaactcaggaggtggaggttacagtgagccgagatggcaacactgcattccaccctgggcgacagagggagactctgtctccaaaaaagaaaaaaaaaaaaaaaagctgtttgatgcacaaggatgataaatgacagtgggtcgggccataggatgctgtagggtcaccttctgctcacacacaggttcccaggaagataatggtgggtgggatggaagagggagcctcagtttctctgtcttcctcagctgtctctgcactctcgaccacacagttgtaatattgcctctctgaaaataaggaagcttctgccaaactaatctggaaagatctccaagaacatattgttaggtgaaaaaaagcaagatgctgaactgcatgtagagtatacgctcccttatgtaagaagagaggggaaagtaaaataaatattttacatttgcgcacatttcatgtgtttgcatgaactaactctgggaagacatacaagaaagcaataaatgtttcaggggaaggagatgaaagtggggagggggatggggcagattggggaatggtaggagatgtaaaaggattaactactgaaacattagcatttaattttgaaattgccagagaagcttacgggtacttgagaaaagcatcattcgtctttttttttttttctcactcttgtcgccttggctggagtgcagtggcatgatctcggctcactgcaacctttgtctcccaggttcaagcgattcttctcctgcctcagcctcccaagtagctggaactacaggcgcgtgccaccatgcccagctaatttttgtatttttagtagagatgaggtttcaccatgttggccaggctggtctcgaactcctgacctcaaatgatccacctgcctcggcctcccaaagtgctgggattacaggtgtgagccaccacacccagccgctcatctaattattgacagggcacgtgccttgcagttttcttgagtccccaccactccctattgtctgcctgatgttgaattctcatctcatctaaagctgagttactctcagctccagctccttattgctacccctgaatgtgggtccaaagtggctagcttctcttatttttcaagagaagtggaaaaccatatttttataagaaaccttccagattttaaatgttggcaaggattaaatttttagaaaatgagaatttctgtggcctatatacaacctctgatccagatgaatccagaatctgtgtgtcctcaggaaatcccccggaggttgttttgcttgactgagtggcagagtttgtagcactctaaggacctgtagggcaactgttctacatactgtttgaaaacagagaagtcaagagccaataaaaaaggctggggaggggactccatgtatggttgctcaaggcgtgcactgcacaagtgctcctggccacatgagagagaggagagctgaaatacaactcactgatggagtgcttcatgatggatggatcaagctggtgacatctgaacccttgtcaaattcaacatcactaaatgagaggcagccagacgtgatgtgccacccaatgaagcaagatgtaccagtcatcatcaaagaattatccttgcaaacacaaccaagcataaaacagaaacattgaaactgaatctgattcatcctctagatcagggatcaccaaactatggccccctagtcaaatctagcctactgcctgatcttgtaaataaggtttcactgggacacagccacactcatttatttaagtattgtctgtgccttgctttcacactgcaaaggcagagttgaaaccatatgaactgcaatacctagaagacgcattatccagatttttacagaaaagttcaccaaccccaggtctagatctagccccccgttcacaggaaatacaggggagagaggagcacactaaatcaacaccatgaggcacgcaatcagcagaatccaaagtgtggaacagcctccaggacaaatgatccagtttcttccacaaataaatggcaagcaaacaaaagaaggaggcaaaactgttcaagattccaagagtcttataagatacatcagccaatcagggaaatggggataacgactggctgttcagtgagtcttaaggaaataacagccattttgggtagatgtgaaaatgacatagtgctaaatgcaatataatatttggggttggatcacggaacagcaaaaacggcattaatgaaaaaaagggtaaaatctgaatagagtctgtgatttagtgaatggtgacaaatcacagtaatgtaagatggtaacaacaggaggggctagatgaggtgtatgtagaaacactctattatcttggcaatttttctataaatctaaaattattcccaaatgtaaagtttgttttaagacaatggtcttgtgattgcagttttgttttgtctttgttgtttgaaacaggatcttgctctgtcgccaggctggagtgcagtggcacgatcatagcttactgcagcctccaactcctggcctcaagcaatcatcttgcttcagcttcctgagtagctaggatacaggtgcacaccaccactcctggtaaattaaaaataacaataattgtagtgatgagatctttctatgttgcctaggctggtctcaaactcctggcctcaagtgatccacccacctcagcctccaaaagcaccaagattacaggataatccactgcacctggctagactgtactttctaatacacagtgtctcttagagtctattagattagactccaatcatctgtaacattaacagatacaatgatgcaatgactagactttgctttaaaataatacagcaaagtgcagataataggtgagagcataaagaaactagatttgccaaatattgatatttattgaagtcaggaaatagattcctgaagatcgtctttatgtttctctccattttggggtgagtttgaaaatgttcataataaaaagtggttttgaaaattgttttaaattaagcctacatgcatttaaacatgttccctaggatgggctgtggctgcctggaagaaaggcaactttatcttatcagaaggcactttccaccaaccaggcaatgtgtcctggcttgtagattccctctgcatgtccatcagggtgccgggtgctggcatccctctttgtggaatgatgggatgacgggggtgtctcacccctggagctcctatgtttacccccaacctaactcaaccaactccatgtgacattgtagaatctgcctcaagtcctgttgcatcctcaagtcctgttgcatggctggctgtgaccacaaagggacccaactttcaaacacactttaatttgggtaataaacagcccacaaaaaaattactggagacatctgcaaagaattcttatctttcacaaaagtcatgggaaactacccttttcaaccattccactgggtataaacaggaaaacaggtagcttcgactgcagtggcagctatcttaagattttggctccttgagaggtgaaaatagtgctggatcaaccccatcctgaagcccacaccaccactggacttacagtcatgaaaaccagtaccttcccttgctgttcaatctgcttgagtttgctgtgacttgcagcccaacaccctttcctggtgggaccacataaaactgtatcagttcatgcaaatctgtacagatttgccaagtgagcccaacaatgcatttgagatggtcaaaccaggagtcccagtttaggtcctgctgggagccctaatccaaataatacaggttttaaaaagcattaataaccaggtctaaacagattcaaagcccttttcacaacccctattcaattaagcagccagccacttgtcaaatacttctgcaacccattccctcctctctgcccctgtgaccactcaattctggcctccatcatcatttgcttggactgtagcagtatcttccctcctggttctcctcctctagtatcatttttctccaaccgtcccttacactggccccagatggccttttctaacttacacatctgatcgaggagatggtaaaactttttttttttttttttgagacagagtcttgctcagtcccccaggctgcagtgcagtggcacgatctcggctcactgcaagctctgcctcccagtttcacaccattctcctgcctcagcctcctgagtagctgggactacaggcgcccaccaccacgccggctaattttttttttgtatttttagtagagacggggtttcaccatattagccaggatggtctcgatctcctgacctcgtgatccacccgcctcggcctcccaaagtgctgggattacaggcatgagccaccgcgcccggccctaactttttttttttttttttttttttttttaaagagacggggtctttcttttttgcccaggctggagtgcagtggcataatcatagctcactatagcctccaactcctggtctcaagtgatcctcctgtcacagcctcctgagtagttaggattacaggtgagtgtcatcccaggcacctaatttttatttttttagtttgttttgtagagacgaggtctcactatgttgcccaggctggtctcgaattcctggcctcaagtgattctcctgcctttggcttcccaaagtgctgggatcacagacgtgagccaccacgctggcaaaactctttaataactctctctttctaattgtggcaaaattcacacaacataaactttaccatcttaaccatttttaagtgcacaggttagtagattaagtggtcatgtggttgtacaagcatcagcatcatcaatctgcaaaactttctcatcttcccaaactgcaactctgtcaccattaaactataactccccattccctcttccctacctgctggcacccaccattctactttctgtctctatgaatttgactactctagggaccttatataagtggaatcatatagtatttgtccttttgggtcaggtttatttcactgagcacaatgtcctctgggttcatccatgttatggcacatatcagagttccctcactgagaatctcattgtttaggaatttttatggaagcttcattttgtaggcatgattcattaaatcactgaccactggtgattaaagagatgaaagagctcaatctccagcttctctccactccctgggggctgaagggtgggattgaaaatcccaaccctggccgggcacagtggctcacgcctgtaatcccagcactttgggaggccaaggcgggtgtatcacttgaggtcaggggttcgagaccagcctgatcaacatggcgaaaccccgtctctactaaaaatacaaaattagccgagcatgatggaacatgactgtaatctcagctacttggaaggctgagggaggagaattgcttgaacctgggaggtggaagttgcagtgagccgagattgtgccgttgcactccagtctgggcaacaagagcgaaactctgcctcaaaaaaaaaaaaaaaaaaaaaaaagaaaagaaaatctcaaccttttaatcatatcttggtttttctggtgaccaggccccatcctgaaaccatctaggcaccccgaaccaatcattagcgtacccaagagactcttatcattcaggagattctaagggtcttagaagcttttgtattaggaaccctagactaagactgaacataacaaaagatgctcctatcatctttattactcaggaaattacaagagttttaagagcgctgtaccaggaatcagggatgaagatcaaatatgtatttcttattatatcataataacagcagaggacactatttaacctactgaagtaatacaagcagtaaagtaggtgtggaaaaactgaaatggtgtctggaatcaacaaagtgtgggacacaaccagacaagaaatcatttgacccctaactctgtcacccactctgtgtcctgcaagagctggcttcaccttgagcatgtcacaggaactggggacagagaccaagtattttttattataccacaggttgatgacctcattccagcccctgaataggccatttctgaaaccggacattacgtcagcccctggatacagccattcctgaaacctgacagtagttcaccccctggatacaaccattcctgaaacctgacattatttcagcacctggatacagccattcctgaaacctgacaatagttcaccccctggatacaaccattcctgaaagctgaccttatttcagcccctggttacagccattcctgaaaactaacattatttcagccccaggatacaaccattcctgaaagctgaaataaggtcagctaccttatttcagcctctagatacagccattcctggagcctacatttaaatgacttgagtcaataaatcccccttaccccagtttttaatctaagtctgtttgcattgtgtctcttgcaatttaaagaattctgatagatacccctgggctatcccgtccatctggaatggcctccccagcccaccacattcattagcctgacacactctggctcacctcccaccttgacccaatgcttcctcctctgggaaggcttccgtgattccatagagcaaacctaagggtgcctatttcactccgaacattcctccctgcagcattcatctggcaccgtgacgattgttgatttctgtgttggctgccctagattgttcgttcctgaggggtgagcactgtggtctcttcgtgtttgtgttcccagccctgaccccagcagcatccagtaaatagctgttgtgttgaatgaaccagtaagtgaatgattaaatagtaaaaagtgttgccttcctctgacaatggatttatttttaaaaagggtaagaaaaacaaaaggctgtaccactgatggtggctgcagggctcatgcatgcattctctcctctgattaaatagcaggcaaggtgtgtgggaagggaacagagggacctcagagacaggcagataaacgagtgggtggctcttgccagcagtaagcctttctttcatctgctgtatggccaacccctgcccccagtgcccacttgccaggctaatctcctctggatccccagaaacaataagaaataatttgtctgaggggggaatcggatgggaaagggggaggaagatatgtccattccattccagctggctccagctctcccccactgctccctgagctagccgaatgcatcttctaatttagttcattcttctcttcctagccattggtaatagacccacacagaacacttggaatttaaccatccttcctccccataagagaaagggagagtgagaagatatgcaaaagagacatagaaaggggaaagaaaagaagggaaaagataaaagaagaatgatcacagtaatggctaagaaatatcattcttactatgcgccaggcacttagctgacaacctaacatgtattaactcaattcattctccttgaaactgtatgggataggttccagtgttatccttattttacaaatgagaaagaggagcaaaaataaagtagaggacaaggtagggatttttgttttttcagagacagggtcttgctctgttgctctgacaggcgtgcagtggcacgatcatagcttgctgcagtctccatctcctggcaagtgatccttctgcttcaacctccccaggcatgcaccatcatgccagtctgagttttgtttgtttgtttgtttggtagagataggatctgcctttgttgcccaggccggtctcgaactcctggcttcaagaaatcatcccacctcagcatcccaaagtgctgggatcataggtatgagccactgagcccaggcaacaaggcaggaattttttaaaatctttctaaatgaaggcactggtggatccccagctctggaacacaaaacagagtaggtgctcactgaacaatactgaatgaaggtttgaaagaaatcctagcccatactgtaaagacatcatcatcaacatcatcacccattactaagtggaaaagaacatgttataaagcaacagataggtaggagatgaattttgcttatctttatacatggatgggaaaaattctgcaggaccattcaccaatagtggggatcatcttgcaggagaaatcagagatcaactcaaacacgtcaaaaacattgatttaggcctggcttggtggctcacacctgcaataccagcactttgggaagctgatgtttttattcacacttaaaactaggaaaatgtcaattgtccatggccaagaattgtgcggtggggtggggaggcaggagagatccatttattggaagtttaaaaataagaataagttagacatcagaataatggggtatagactcagaaggggtgccaaggcaccttgctggggggtcagggttgttctccatccagatgtgggtgatgttcactagttgtatacatctgtaaaaatttgtggtgctctgaacttaaagtatatgcatttttatacatcttgtcaaatgtatcttgacatcccaatttttaaaaacttttaaaatgcaaaatatttttgaattatcgacgagcacaatggcttggctggtagaaggctgctgctggagactgtaaaaggctaacgccccaggttgtaccgtgggcccatgttgtaccgtgggcccaggttgcttgtcgcccctgaggaggaaggagttagctcatccgtgccagctcccttcccatgacaacaggagagtgcagcacttagagacactggtctcagcactttttaatctgagagctttggaaaagcctccgagtcgggggaggaagaggagagctctcagaagaactggctggcaagatgctggggtggtggaaaaaaaagatgcttccaaggcaaaaaaaaaaaaggattaagaaccagctctgatgggatctgaatacactgccttggaggctggagagatttccacccatttctgcctcctctagagaaaaggcaaaaaaaaaaaaccctccagaaatgcaacatttaagcttcactaacaaaccccgccccaccaccaccaccaccaaaatgaaaatagagctcacttaaaaaaattattttttggctgggggcggtggctcacgcctgtaatcctagcactttgggaggccgaggtgggcggatcgcttgaggccaggagtttgagaccaggttgggcaacaatgtgagaccccgtctctactaaaaatacaaaaattagccaggtgtggtggcacatgcctgtaatccccactcctcgggcatgctgaggcaggagaatcacttgaacctgggaggaagagattgcagtgagccaagatcctaccactgtactccagcctgggtgacagagagagactgtctcaaaacaaacaaacaaacaaaataaaaacaaaaaaaattaaccctctaaagaatatttatccagaaagcattcccaagaaaactaggtacaaatactagatcagcctcacaaagaaaacacacatatatttttgtgttccatgactgtctagttggctggcttgggtgcgggcaggtatcccagggtccagatactacacctatagaactgtcatctaaccagaaacacaaaaatagaggcagatttctctgttcttcagcgctcaagtgctacaccactaagatttcaagactaggaactggctttgctcctggaaatgaacagaaaaggaacttttaggctaacccagggagaaagacagttatgattgtgagcgtgaagttatccgcaagtgaattatgcactttatgagtaaaggttgtaagtttttgtccttgatcagtcacctttgccactcctggatgtagaagagaaaggtggtgtctaccagcgtcctgggcatgggatggactacatttcccagatgcccttgcaattctgtgtggtcatgtgaccagggaaatgggagaggttgcaggtgcctgtttcagatctggattaggtagatagttaccacaaaggaaaatatttgtgtatctaaacatatctaaccatagaaaaaatatagtaaagacatgatataaaagataagaaatggtacatctatataggacattcatcagaaatggagcttacaggactacaggctaattcagtgaagagtgagtgagtgtgaaggtataggacattaccatacactactatagaatttacaaacaccccggtcgccccatctgggaagtgaggagcgcctctgtccggctgctgtgcaaccttccaagtgtgaagtgatagccttgtgtgtgatcttttctgtcttcccccaagtttgcatttttgacattaaagtttactttttaattaaaaatgaaaaaaaaaaaagaatttacaaacactccacacttaggccacgctacatttacaaaaaacaactctttctttcttcaataataaattaccctagtttactataactatttttactttattaactttttaatttaaaaaatttttttgtttgttttttgtttgtggagtgttgctcttgtcacctaggctggagtgcaatggcacaatcttagctcactgcaacttccacctcccgggttcaagtgattctcctgcctcagcctcctgagtagctgggattacaggcatgtgccaccacgcccagctaatttttatatttttagtagaaacagggtttcaccatgttggccaggctgatcttgaactcctgatctcaggtccacccacctcagcctcccaaagttctgggattacaggcgtgagcaattgcactagccttaaaaactttttgtaataacactttagtaatcgaagattactaaatctagatgctggtgctttttgtaataacactggaataacactgataaactttagtaataacacttagcataaaacacattgtacatctgtaaaaaatattttctttctttatatccttattctatatgcttttttctatatttaattaaaaaatagttttatttctaaaacatttttgttaaagtttaatacacaaacacacattagcctagtactatacagggtcaggatcattaagacgtcactagaaaatataaacgttttagctccgttagattttttttttttttttaatgagacagagtctcactctgttgcccaggctggagtgcagtggcacgatctcggctcactacaacctctgcctcctgggttcaagcgattctgcttcagccttctgagtagctgggattacaggcacacaccaccatacctggctaattttttttttgtatttttagtagagacggggtttcaccatgttggccaggctggtcttgaactcctgacctcaagtgatcacccgcctcagcctaccaaagtgctgggattacaagcatgagccaccgtgcccagccttccatgataatcttacggggccactttcacacatgtggtctgtcattgaccaagacatcattatgaggcacatgactgcatttatttatgaaatgacccgagaaaacaccagtagggcagaaaggaagtgagacaaggaatcgaaggcagccagtgagtggtgtgttgttgaaccaggtaccactgtgggcacctgggactgaataacactggtgagttctgggaagcagagtggaacatagaccttggaggcatccacccaagtgggagggagctggagtatttaaacaccaaccctcagtagtcattgttgggcctgctccccagcacttcaggcttgccttggttgcacacatagagaactttggctgccaggacataaagatgcagttgctgtcagccgagaattgggctggaaggtatagatatgggaagtgccagaaggatggcacgcggaatatctatagtatcagcaatggcagaaccacacaacagaaagaacctgggctcctgaatgactgcctggagcagagccactgtcatcaacctagaccgtagcaacttgaactgtaacaattgagaggaaaatactcccaccctctttaaggcattgaaatattaatagtattggggttctttgttaacagcagcctagccttatcctaacagatatatcagcctttttttctactgagcctgagagctgcaatttcagagagaagagcacccaacattgaggatttgcagttttgatgcatcatttcactgagtgttcctgagaagcctctgccaactcatttggtagcccaccaataataacccctcagtaaattttgagggagggagtacacccaaaaatgctggaagttaacacccctggaaacaattaatgtcctcaacccatgagtaatgagaattgttggataaataccccagctccctcacctctaaagtaggatgcctgaggtctatgctatcctcctccagtgcttcctgatggggctgagccccaattgcccacagtgatgacttaataacataccattcactagctaccttcccttcccttccctctttcacttcccctctcgcctatgggtatttcctggagtaacctcccaaatgactattcgcacttgaattcttttctcagagtctgcctcaggagaccccaaacgaagcctggggataaattattatcacctttaatgcacagaccaggacacatagaaagaccacagtcatcccaggttatgcagcaaggaggtaacatagctgagacccaaattcccatcttgactccaggattcaacctcttaactccattgctgtccagcaagctggacttctccacaagggaatcctcccccgtcaagcacatttatgggtaaagccaccctcatcatctctttcccacaggcttgtgactgtccaggctttaaatataaatttggcaaacatttattaagcacccacagtataccaagtactaacaccacattgattcattgaccctgctctcaaatagctgaaggtcaaactagggagcaaatatttgaagggagaaacaccaaaccaactgggaggttgtaatcatggctgctgctcactgctcaggctgttacaatggtgaaatataccacataagttcatagatagccactgtcctgagttatgatggttaattttgtatgtgaatgtgactgggctatgggatgcccagatatttgcttaaacatgatttctgggtgtgtctgtgagggtgggtattagcccgttttcatgttgctgataaagacataccagagaccgggtaatttataaagaaaaagaggtttaatggactcacagttccacatggctggggaggcctcacaatcatggtagaaggcaaaaggcacatcttacttgacagcagacaagagagaagaaccaagtgagagggatttccccttataaaaccatcagatctcatgagacttattcactaccatgagaacagtatggggcaaccacccccatgattcagttatctcccaccgggttcctcccacagcacatggaaattatgggagttacaatttcaagatgagatttgggtggggacacagccaaatcatatcagggtgattctgaaagagattagcgtttgcagtgggggactcagtaaagcagatggccctccgcagtgtagctgggcattgtcccatctgttgaggggctgaatagaacaaaaaagtggaggaaggttgaattaactctgctggactgcggagctgggacatcaattttctcctgcccttggtgctcctggttctcaggccttcagacctggactggaatcagccctctggttctcaagccttcaaaatacaccaccagctttcttgggtctccagcttgcagatggcaaatcaggggacttcttagtttctataattacatgaaccaataccttatagtacaccctctcctacatgtatacacatgtaaggccaacaggataaatatagacatagacgtggatatacacgtgggtatgaatagacatagatgaagatggacataggcatagatggagatggagttagagatataggcttcatcctattgtttctgcttctctggagaactttgattaatatatgagtacccctgagggccccccacctgctctctgggtccttcctccaagccaccctagacctccttttgacccatcaaataaagggatagggccaggcatggtggctcacacctgcaatcccagcactttgggaggcagaggcaggcagatcacctgaggtcaggagttcaagaccagcctggccaacatggcgaaaccccgtctctactaaaaatacaaaaattagcacagcatggtggctcatgcctgtaatcccagctagtagggaggttgaggcaggagaatcacttgaacctgggaggtgggggttgcagtgagctgagaattctggaattctagaattcagttctggaatatagaattcctagaccaaggtttcaacacgccacttcactccagcccgggtgacagagcaagactccatctcaaaaaataataataataaaataaaaataaataaagggatagttcgggcactcaggaaaaccctgggctcccagtccctagctatgggtcatgtgcacactgatgggctgatgcctgtgccagatctgattatcatagagatgcatcctcagtggggaggacaaggaaggcgtcatccgctttacctgagctggtcaggtaaggcccagactaggttgtttttttattaatccagaaaacagcaacctatggtgggtataaagttctttggtgggggtgataaaaatgttacgaaattagatggtgttgttgattatacaatctagaacgtgctaaaaaccactgaattgtacactttaaaggggtgaattttaaggtatgtgagttatagcccaataaagctgtttatttatttatttatttatttttgaggcaagatctcactctgttgcccaggctgggatgcaggggcacaatcacagcactctgtagcctggaactcctgggctcaagccatcctcctgcctcagctccctgagtagctgggactacaggtgcaccaccatacctggataattttctttttttttttttttttggtagaaacaaggtcttgctatgttgcccaggctggtctcgaactcctggcttcaagagatcctcctgcctcagcttctcaaagcgctagaattacaggcgtgagccactgtgcctcgccaaagctcttgttttatttaaaggaaagaaaacaacagcctaaaccccatttcctgacacccccgtgcatcgagattggggccagagtgaggagaatgagcactggctttgagcacaaaattaaacacttacacgctgggctatttgagtttgctacggctgccgtgacaaggcaccacactgagtggattcagcaaaaaaacagactgtctctcagttctggaatctagaattcatagatcaaggtgtcaacggggctatcctccctctgaaggtgcggaggaaggatttgttccaggtctctctcctggcttcaggtcgtctctcagcatatggcagcacaactccaatctttttattttatttatttatttatttgagacgtagtctgactctgtcgccaggctggagtgcagtggtgcgatcttggctgactgcaacctctacttcctgggttcaagcgattctcctgcctcagcctcccgagtagctgggattacaggcgtgcaccaccacgcccagctaatttttgtatttttagtagagatagggtttcactatgttggcaaggatggtctccatctcttttttttttttttttttttgagacggagtctcactctgtcacccaggctggagtgcagtggcgccatctctgctcactgcaagctctgcctcccgggttcacgccattctccagcctcagcctcccgagtagctgggattacaggcgtgcgccaccatgcccagctaatttttgtatttttagtagagattgggtttcactatgttggcgaggatggtctccatctcttgacctcgtgttccgccccccttggcctcccaaagtgctgggattacaggcatgagccaccgcactcggccccacaactccagtctttacacaacattctcccaagtgcacatggctgtgtccagttttcccctttctatatggacgacccactcacattggattaggggcccacctcatcttaactaattatgtctccaactatgtctgcaatttccaaaaaagttcacattctagggtactcaagatgctatagtcttaatgttgtgtctctccaaaatttgtatgtttttttgttgtcatttctggtttttttgtttgtttttgttttgagatgaagtcttgctctgttgtccaggctggagtgcagtggtgcaatctcagctcactgcaacctctgcttcctgtgttcaagtaattctcccacctcagcctcctgagtagttgggattataggcacccgccaccacgcccagctgatttttgtatttttagtagagacaaggtttcaccatgttggccaggctggtcttgaactcctggccttgagtgatccgcctgcctcagcctcccaaagtgctgggattacagacgtgagccactgccccagcccactatttgcatgttgatacttagtccacagtgcaatagtattaagagggaggactttgagaggtgattaggtcatgagtactgcaccttcacgaatgggaatagtgcctttataaaagaggctcaagggtggttcatgcctgtaatctcagcacattgcaaagccaagacaaaaggattgctcgagcccaggagtttgagaccagtctgagcaacacaggaagatcccgtctctaccaaaaaatttttaaaattagccaagtgtggtggtgtgcctttgtggtctcagctattcaggaggctgaggcgggaggattgcttgagcctgggaggtcgaggctgcagtgagccatgattgcaccactacactccagcctgggcagcctatctcaaaaaacaaaacaaaacaacaacaacaaaaaaaaaaagagagagagattccaaggagtctgcttgccacgtccactatttgaagacacaatgtgctgtctatgaggaagggccctcaccagacaccaaatctactggtgccttgatcttggacttcccagcctccagaactgtaagccataaatttcctttgtttataaattacacagtctaagacattttgttatagcagcccaaacagattaaggcggggcgttaggaccttaacatatgagcgtgaggggtaggagagggaaacatttcaactcatcacacatgccaagccatattgcatcctgaggccaaaggaaaaatctgaaatactgatcttgcttttattgagaaagttgatatttttgctcatcatggatttttgcattgatttttatttctgaaattattgtactaaaatgttatttaccttgatctctgaatttgttggtactcttagagtttgtgcctaacgtaagcacctcccctacctcaccccagtcctggcccagtctggcttgcttcatgattttcaaagtccgcaacaagtggcttccccaccacatgtgcaaattctccctccacccttggatgggatttgtttaggcccagaaagtttaaaggagctgtggtgttttgttttgttttgttttgttttgttttgttttgttttaatctgcctctgcctaggtcactggcttcatttcctccttcattgaggctgttcttcctgccttctttgaagacttttgcttttttccccagctttgttgagatataattgacaaataaaaaatggtgtacatttgctatagtttggatgtttgtgtccccaaacctcatgttaaaaattttattattatcattattagtttacagacagggttttgctctgttccccaggctagagtgcagttgtgcagtcatagctcactaaagtctcaaactcctggttataagtgatgctcctgcttcagcctgctgaatagctgggactaccgacatgcactaccatacctggctagttgtttgtttttgtgtgtgtgtgttttgtttgtttttgtataaacaaggtctcactctgttgcccaggctggtcttgaattcctggccccaagtgatcccacctcactttcaaaagtgtggggattacaggcatgagccaccgcacctggcctcatgttgaaattttatccccaatattggaggtggggcctgatgggaggtgttttggtcatgggagcagagtggatccctcgtgaatggcttggtggctttctcatagtaacgagtgagtgacttctcactctattagctccagcaagagctgattactaaaaggagccctggccgagtgcggtggctcacacctgtaatcccagcactttgggaggccaaggtaggtagatcacctgaggtcaggagttagagaccagactgaccaataaggtgaaatcctgtctctactaaaaatacaaaaattagccgggcatggtggtgggtgcctgttatcccagctactagagagactgaggcaggagaatcacttgaaccggggaggtggaggttgcagcgagctgagatcgcaccactgcactccagcctgggagacagaacgagactctgtctcaggaaaaaaaaaaaaaaaaagagccccgcacatctccctgccctctcttgcttcctctctcaccatggatctccacacactgggtccccctttcccttccactatgagtagaagcagcctgaggttctcatcagaagcagatgctggtgccatgcttctggtacagcttgcagaactatgaccaataagcctgttttccatttgtgtacccaaggagtacctgaagctgggtactcttttatagcaacacaaatggactaagataatatttcaggtgtacaacatgatctttgataatgtgtgtacatcgaaaaatgattaccactatcaagcgaattaatacatccatcacctcatctggttaccatttagtctgtgtgtggtgagaacatttaagatatatccttttagcaaatttcaagtagacaggctgggtgtggcagctcacgtctgtaatcccagcactttgggaggctgaggcaggtggattacttgaggccaggagtttgaaaccagtctggccaacatggtgaaactccgtttctactaaaaatacaaaaaaaaaaaaagagccgggcatggtggtgggcacctgtaatcccagctactcaggaggctgaggcaggagaattgtttgaacacaggaggcggaggttgcagtgagccaagatcataccacggcactccagcctaggtgacacagcaagactccatctcaaaacaaaacaaaacaaaacaaatcaagtagacaatacagtattcttaactatagtcatcatgctgtacattaactccccagaacttactcatcttgcctaactcaaagcttgcactgcttgactgacatttctgcatttcttccctgcccccagtcccgggtaaccatcattctactctctgcctctgtgagtttgacttttttagattccgcatgtaagtgagatcctgcagtatttgtctatgtgtagtttatttcacttaacataatgtccttcaggttcattcatgttgctgcaaattacaggatttccttcctttttttttttttttttttttttttttttagtaggatctcgccctgtcacccaggctggagtgcagtggcgcaatcatagctcactatatgaactcctgggctcaagcactcaggcgatccttctgcctctaactcctgagtagctggaattataggcgggagccatcattcccgactattctgtgattctatttgaataattcaggctaggcgcaatggtatacgcctgtaatactatcactttgggtggccgaggcaggaggatcacttgaggccaggagtttgagaccttcctgggcaacatagtgagaccctgtctctacaaaaaaattttaaaatagccaggcatcgtggtgtgcatctgtagtcccagctacctggaaggctgaggctggaggatcacttgagcagaagtttgaagtaagctatgatcacaccactgcactccagcctagatgacagagtgggaccctgtctctaaatgataataataataatggcccgggtgcggtggctcacacctgtaatcccagcactttgggaagctgagacaggtggatcacctgaggccaggagttagagaccagtctggtcaatatgatgaatccctgtctctattaaaaatacaaaaattagctgggtgtagtgacgaatgcctgtaatcccagctactcaggaggctgaggcataagaatcacttgagcccaggaagctaaggttgcagtgagccaagatcgtgccactgcactccagcctgggcaacagaataagactctgcctcaaaaaaataaaaataaataataataaaagaaaagaggccgggcgcggtggctcacacctgtaatcccagcactttgggaggccaaggcgggcggatcatgaagtcaggagatcgagaccatcctggctaacatggtgaaaccctgtctgtactaaaaatacaaaaaattagctgggtgtggtggcaggcaactgtagtcccagctactcgggaggctgaggcaggagaatggcgtgaacctggaaagtggagcttgcagtgagctgagattgcaccactgcactccagcctgggtgacagagcgagactctgcctcaaaaaaaaaaaagaaaagaaaagaatgattcagtcctgcctggatcattctgctcaccttccatgggcttcctgtcccatgtagatggccaccatcttgctaagaactagggaaggtagagtgagagctggagaagagggaatcgatccagtattagaagaaccatccaatgaggttattttggaaagagctattttaacctgctacccactttgatacacatggaaaatatctcaaactacagggaagatctgaacgtgacagatctcataatcagtgagagggataaataggaagtactttcatagcactcactatatacctgacacatcacatttattagctaaccttatgagattgatatgattgcgatccctttttctttttctttttttcttttttttttttgagatggagtctcgctctattgcccaggctggagtacggtgatgtgatcttggctcactgcaacctctgcctcccgggttcaagtgattcttctgcctcaacctcccaagtagctgggagtacaggtgcacaccaccacacccagctaatttttgtatttttagtagagacggggtttcaccatattggccaggctggtcttgaactcctgaccttgtgatccgcccgcctcagcctcccaaactgctgggattacaggtatcagccactgcacccggctgattgctctcccattttacaggtgaggaaactgaggcccagagaggtgaagtgactcttccaagaccacacagctagtgagtgtggcagagccaggatttgaacccaggccatttgaccctctctcccttctttgacctgctctgctatagctgcctctattactagtattgctataataatattatttattattctaataatcataataatattaaccaccatggatattgaacacaaatcattatttgattgtagcacctatccagccctgcatgatctggagagactttatttactgtgcatcagacactggtctgatttccatctggggtgatgaaactgttttggaactagaggtgatggttgcacaacatcataaatatactaaatgccactgaattgtttgctttaatatggttaactgcatgttatgtgaattttacatctttttaaaaattctaaatcaatagccaggcatgggggtgagggcctataaatcccagctacttgggaggctgaggtggaaggatcacttgagcccagagttttgaggctgcagtgagctatgattgcaccactgcactgcagcctgggcgacacagagagactccgtctctacaaaaaaaaaatttttttttttgagacagagtcttgctctgtcgcccaggctggagtgcagtggcacgatctcgactcactgcaagctccgcctcccaggttcatgccattctcctgcctcagcctccagagtagctgggactacaggctcccgccaccacgcctggctaatttttttgtatttttattagtgacggggtttcaccacgttagccaggatggtctcaatctcctgacctcgtaatctgcccgcctcagcacccccaaagtgctgggattacaggtgtgagccaccacgcccggccaaaaaaaatttttaaattagctagacatggtggtatacacctgaattcccagctacttggaaggctgaggcaggaggattccttgagcccaggagttcaaggctgccgtgagctatgatggcaccactgcactccaacctgggtgtcaaagcaagaccatctctaaaaaaaaaaaaaaaaaaaattgaaatcaaatcatgttactcccctgcttcaaacctcctatggctccccattgcacttagaaaaaacaagcacacatatattcattgcagcagtattcatgatagcaaagatatggaatcaacccaaatgttcatcaataacagactggaaaaagaaaatgtggtacatacacaccatagaataccatgcagccataaaaacgaatgagatcatgtcctttgcagggacatggatggagctggaagccattatcattatcctcagcaaactaaaacaggaacagaagatcaaacaccacatattctcacttataagtgggagctgaacaatgagaacacatggacacagagaggggaagagcacacgctggagcctgtcatcggtgggaggaggagagagagcatcaggataaatagctaatgcatgctgggcttagtacctaggtgatgggttgataggcacagccaaccaccgtggcacacgtttacctatgtagcaaacctgcatgtcctgcacttgtatcccagaacttaaaataaaattaaatttaaaagaaaaagaaaaaatgacccagcctctccatgctggtctacaggagtctacataatctgactcctaccaacagcatcttctacttctctcccccaactcatcccattccatcctcaccagcctctcttctgctcctaaaacatatcagggtcatcgctgcctcaggacctttgcactttctgttccctcagcccgcaacacctatccttgcatcctcagtggctgcctccttctccccattcaggcatcactgccatctcttgagagaccttctctacccaactgctcacccctccttagcccatctcataatgacccctgaaaacatctctcttcaaaataatctgaaatgatgtgcttacttttgggcttaatcatttattatctgtctttcctgtgaaaatgtaaattccggccaggtgtgttggctcacacctgtaatcccagcactttgggaggctgatgtgggcagattgcttgaactcagaagttcgagaccagtccgggcaacatggcgaaaccccatctctactaaaaatacaaaaattagccaggtgcgatggcacgtgcctgtagtcctagctatttggaagggtgaggcaggaggatggcttgaggctgggaggtcaaggctgcagtgagctgtgattgcaccactgcactccagcctgggtgacagagcgagaccctgtctcaaaagaaaaagaaaaagaaaaaaaaaagcaaatgtaaattccacattgatattatccaccaccagactccaggccttagcatgttgtaggaattcaacaaatgcatcaactctacctcattagcaccttcagtttctcttggttcaatggccagtggctcccgggagtaaaggcatgggattccaaaaagaaatgtaaacatgttaatattataggtcctgtattatccagccatttctacatcccgatgagaagctactggtccccagccagatccctctgacccagctgggggtctgtcccaggctactgtgagttgggctgtttttttgattttggggttttgttttgtttttgtttttaagagataggatcttgctctgttgcccaggctggagtgcagtggcgcaaacacggcccactctgccttgacctcctggactcaagtgatcctcctgcctcagcctcccgattagctgggattacaggtgcatgccaccacacccggctaatgtttttttatttaattttttgaagaaatctgggtcttgctatgttgcccaggctggtctcaaattcctggcgtcaagtgatcctcccacctcggcctccgaaagtgctgggattataggcatgagccacgatgcccagttgagttcttagtggctcccagacatccccttagctgatgggcgttacgtcaccatgagatgcctgggttagacccatgacccctcttccgggaggcggccactgcctgtagctggctgagcctggggtttaagagcccagacccagacgggtacggtggctcacacctgtaatcccagcagtttgggaggccgaggcgggcggatcacgaagtcaagagatcaagaccaccctggccagcatggtgaaaccccgtctctactaaaaatacaaaaattggctgggcgtggtggcgcatgcctgtagttccagctattccagctactctggaggctgaggcaggagaaacatttgaacctgggaggcagaggttgcagtcagccaaaatcactccattgcattccagcctgggcgacagagagagactctgtctcaaaaaaaaaaaaaaaaaaaaaaaaaagagcccagaccccttgctcatataccctggtgggtagatcaccctgaggtgaatcaatgagctcctcaccatccggaacctcccccaggatcaggtggaggctgaacttgggctgaaccgcatccttgatcagcttcttcctctgccctgtgctgcttttctcattctccttagaccaccgattctcaaactggaaacactcccagaggtcctgacttaattggtaaggcacgaggcccagccacacggatttttaaaaatctccccaggcaattataaagtgcagccaacttagagaagcactgcctcagaggtctctcctgagaacaccccctttgtaagctccttacccaagaatcgccagcgtgggctcctcttccaggaaatctgacctaacgcacttgctgtccactgaaagcgcctactagcagctaggacccaatgccgggggtgcaggaattcctcttccaggcccagagcccagcccacagccagggtggccttctggtcatgcagatggagcagcaagaacgggggtgggcaaaagggggcgatgagagaaagcatgtgtgagagagaaaggcgggggcaggagggagagagagacagggggacagacagagacccaaagagagagacagagagagacacaaagacagagagacccaaagccatatggagagatacagagagagaatggctgggtgcagtggctcatgtaatccctgcattttgggaggccgaggcgggcagatcacttgaggtcaggagttcgagaccagcctggccaacatgacgaaaccccgtctctactaaaaattcaaaaattatccaggcgtggtggcgcatgcctataatcccagctactcgggaggctgaggcaggagaattgcttgaacccgggaggcagaggttgcagtgagcagagatcatgccactgcactccagcctggctgacaaagcaagaccctgtctcaaaaaaaaaaaaaaaaaaaaaaagaaagaaagaaagaaaaagaaaagaaaaaagaaagatacagagagagacccaaagagagacagacagagagacccagagacagagagagacagagaaaataagagaaagagacagagagatccagagacagagaaagagcaacacacacacacacacacagacacacacacacacacacacacacactggtgcagggaggctgttggaggaagagagaacaaaagagagagagggtgatgcaaagacagagatagagatccaaagggagagagagaaaggggcagaaataaaaagacagagacccaaagaaagagaaagaaagaaagaaagaaagagacccaaagagaaagacagagagaccgagggaaaacagaattcagatagagagaaacagagacagatgagagaggaataggaagccccttctctctctctctctctctctctttctctgtctctctctcagatggagtctcactctgtcacccaggctggagtgcgtgacttgatctgtagttccagctacttggaaggatcagtcttggctcactgcaacctctacctcccaggttcaagtgattctcgtgcctcagcctcctgagtagctgggattacaggtgcccaccaccacgcctggctaattttttgtattttagtagagacagggtttcaccaaatcgcccaggccggtctcgaactcctgacctcaaacgagcctcccgccttggcctcccaaagtgctgggattacaggcatgaaccaccgctcccagccctgggcagccccttctattcagtccttcgccctcggttggcatggcatctctgctcctcgccccacttggaatacccagagaccactggccggggagaaggagaagagcatccaggaaggctcttggccaccttatctgacactgccaaggtagctcctccccagggctccttgagccgctcaccagcttcagtttgttaaatttagctcagattcctttgctctgagtaaattgcgtctttgcaaaggagcagaagaggactaaacctgtttacagtgtttgaaacccactcactaaaatattttgcaacgatcacaataatgactctgatttccatgccggccgcctctcaggagctggggttggtgcagggaccaagggtgccgcctggcgtggcatgtgaacaactgcacgctgagctcaggcaaacctgggttcaatcccagctctccaactgacctgccggggggcctttacacgtggcttttaatgcatcccataaatggtatatcagtgattccccatctcaccggctttctgtaaaaagattaagtgaaatgctggaggctgagccactacaactggcaaaatttaagaggacaataggttggtggttacagggcacaagatccagagtcaagctgcctgggttcaaatgccacttgtaccccatatgacctaggacaagttacctagtccctccgtgcctgagtttcctcgtctgctaaatggggataatgctaatggctaactcataggcttcttgctccattcttgattgttttcctacttatcttttggtttcagctcatgagtcccttagaaagctattgctaggctggcgacggtggctcccgcctgtgatcccagcactttgggaggccaaggtgggcagatcacttgaggtcatgagttcgagaccaggcctggccaacatggtgagaccctcccccccatctctaccaaaaacacaaaaattagctgggtatggtggcgcacacctataatcccagctactcgagagactgaggcaggagaatcgcttgaacccgggaggtggaggctgcagtgagctgaatttgcaccactgctctccagcctgggcaacagaatgagactctgtctcaagaaagaaaagggaagggaaggggaggggaggggaggggaggggaggagaaagaaagctgttgctaatccatcagttatacctctcttaaagcatttacctcattgggacagtctatggcaatgattttgaattcattgagggcactgactataatgtattcatccatatatgcctgatggataacacaggagctgatccacatcaacccctctgacttcatttcccatcactcccacctcactcaccttgtcccaaccaacaccagctgtcttgctgatactcaaaacacaccaggcacattcctgcctcagggcctttgcacttgctgttctctctgcttggaacttcctttcccaagaactttgcatggctggctcatcctcttcattaagcactcaattcaaatatcagttcaccagatgaaccacccctaaccaccttttcttaggttctcctgtttcagtcacgttttaccccatcgcagtgttattgtcaatctcactgcctcaaattattgtattatctatttactagtatattatctgttttcccttataaaatttaaactccatgagtgtaaagtccttgtctgatttgttctctgcctccaaagtgttcagtgataagttggtgaggtgatgggtatgttaattagcttgattgaatctttccataatgtacacataggttgaaatatcacattgtagcccatgaatatatacaattgttgtttgtcaattaaagtcatttttaaagctgcttgatgaatctctgttgaatgattaatgaatgaacctcatccacttccatcccttctataactatgtctatgtagcacttactgtgtgccaagcactgttctaagtaatttgcatgtattaattaatttgatgctaacaatctctctgagaggtaggtgatgcaattatcatccccatttcatagttgaaaaaaactgaggcacaagatgttggtccagtaactggtatacaagccaatgaaatctggatttggtatcagaagtggggtgccgttaaatgcactaagattacaaagctggtaagacgttgggccaggatttgaagccaggcactgtggctcctgagcctacaggcttagtcactctgttcaatttctcacagttccccaaacactatttctacccacttttagtctcttctgctctgttccccaatttcttatagcctcctaggcaactccactttgactctccccaaactagaaatctcagatttccctttgaactcacctgttctttcacttcctagatgaagtggtacttaacttgtttataattcagggagcctgtaaatttggttgggaaaattcgcatattcattacagcctctagctgtaattatgcatggaggcaacaaattgcagcaatattagcagtgttcatgacacctgtgactttgtcatcaacagaaaccacatctcagctgggggcagtagctcacgcctgtaatcccagcattttggaaggccaaggcaggtggatcacttgagctcaggagtttgagactggcctggggaacgtggtgaaacccccatctctacaaaaaaatacaaaaattagctgggcatggtggtgcacacctgtagacccacctactcagggggctgaggttggaggatcacttgcacctgggaggtagaggctgccatgagctgtgatctcaccactgcacctgggaggtagaggctgccgtgagctgtgatctcatcactgcactccagcctgggcaacagagtgactctctctcaaaacaaacaaccaaccaaaaaacagaaaccacatttttattatgtcacattgtaattattgcagatatcttgaaactcacttactctcatgactaccttgaagttgttaggtctgttactagctcttgttatttatgcattatgaaagaaacacattagtgatgtatgacaaatctgttctttcaaatatttttataactaatgttcaatgtaattgatttcctctgcatttgatattatgcacttaaaaagcacaattctgagaagagatcccttggcttttgtcaaactgaagagagctccacggctcagaaaatgttaagaatcttcacgccagccaattagcaagtgaatcctattgattctccttctaaagtgtttcttagatcctctccccacctttattcccaacactgctgtcctagttcagctatctcctgactcactggcattgcccccctccacacctccctcttgctcatcttcccctcccagttttaaaaatctatgacaaaattaataactagtatttacactgagttttagggtttacagcagatgttacaaactcagagctcacaaattacttccttgatctatccacatcttaagataaaaatatgttcagaacaagtcaggagattacatataaaagtgaaatttttgctttttctcaaaaactcagacgatttacccgagctgagcctacattcctgcatgacagcaatcagcttctattgaataatggttatatccttcagatgagcctggagctatctagtttgccaaagacctcaccactctctaatgtctccctgacatggaagctgccccagtcaccattacccacttggcccctgtagacaattgagtttagcaaccctggatttcaaagtaccttatttgatccttataaaagccctgcagagtgtgtatggtacagattcttatcctgttttacagatgatgcaactgaaaactcatgaaagttaaataaaacacagggtcacgtaagagtagaaagagctggcatttttctctccagactctgtacttcccactgacctggactcttttcagaaattactttgtaaaacaccattatgatgtgttgaagtgcatggtctcccatcaaaagacctccgatgctactcaggaggctgaggtgggaggatctcttgagtctaggagttcaagaccagccttggcaacatagtgagaccccgtcgctcaaaaaataaaataaaataattagccaggcatagtggtgtgcacctgtagtcccagctacttgggaggctgaggtgggaggattacttgagcccaggagttccaagctgcaatgagccatacacgattgcaccactgcactccagccaatggtggacagacctccaatagcctggtcaatgaaaatgggataaatcccaagcttcccaaggtgatatctgagctccttcaaacctggcagcctcccttgcagcttctgctttcaagtttgacacgccccttctttaaagtcagacttttgaatgttcaattatgcaaagccaccatgctataaggaagctcaagctagccacatggagagaaagaatatactgaaaaagctcatgtttggtgcaaacatgtgagtgaaacctcatggactgtccagccctgccagccatcaacataacgcagctaaatgagagactgcattatgttgagattacagcagaaccacactcctgagtttgcaaacccaccttcttatctatttgagatactcacgtgctcagacacaaaaactaaagataaagacgtgagtaagtagatcaaacacactgcagggaaggttaaaatatgtagctaccagtaggaggcactatccccagagcactgattgtcaggaggcatgggaggacccaggaagggacttgggtgggtgggggagctcactaggggcctccaggcaacagctatttactaactggtgtggaaatattttaatattttaacaatcagctgtgccaatgtgtctcagctgaatatctgccctgaatacacagaaaggagattattgaagccaaaagaataagaatccaagccgtgaatcatactgcaatcattccgccttggcttagaaatggattagacaccatcatgttttttcattccccagtggattttaaatttccaagttggtataaacctgggggcctctgctgagtgtatcataagtaaagtggaacgtgatgactcgcacactggctagaatcgcctgggaactttatttttattttatttgtatagcagcagagtcttgctctgttgcccaggctgaagggcagtggcatgatcataattcactgcagtcttgacctcctgggctcaagcaatcctcttgcctcaacctcccgagtagctgggactacaggtgcatgccaccatgcctggctaaattttaaacaaaatttttcgtagagatgggatcttgctatattgcccaggctggtctcaaactcctggcctaaagccaggagccaggcctcccaaaagcactgggattgcaggcatgagctaccatgcccagcctaccaggtaacttgaaaagtgctaatgccaggaccctacatccagagttggatttaatggagtagggcctggacatcatgatttttaaaacagcccagatgattgtgcagccaaggttgggaaccactgatgtaaagccatgcttcttaaaatgcggtccacaaaccagcagcagcagcatcacctaggagcttggagaaatgcagagtctcaggctctgctgggacctactgaatcagcaaccccaaggtgaacccagaaatatctgtgttttcacaagcccgaaggggggggctgatgtgtgctcaaggaccagagagctggcagaatgaaagatccactacctgtttctcttgcaagaccgccatgccacatggacgcaaggtcaatgaaaaccctccaaaactccactgtgccatgaacatgctggggtctccaagtccagcacacaggctaatctggggctggagactttgttttttgtttttgttttgagatggggatctcactctgtcacgcaggctggagtgcagtgctatgatcacagctcactgcagccttgaactcacaggctcaagcgatcctcccaccttcccaccttagcctcccgagtagctaggaccacaggcacgcaccaccacgcctggctaattttttttttctttttttctgtacagatgggggtctcactatgttgcccaggctggtctcaaactcctggcctcaagcagtcctcccacctcggcctcccaaagtgctgagattacaggcatgagccactgtgcctggccatgggctggagattttggacacagatctcaggagactgaaccagactctggaaaattggctgtgcttgtgggagccaaccaagggaacatttaaggtacgcctgagaggtcccaccaaagggggaaagaaaatgggtgaaaatgagtcctaccctctgcaattgagaagcccaaggagctctccaacgggctgcacctgctcctgctttagggagcctcttttttttttttttctcgctctgttgcccaggctggggtgcaatggcacgatctcggctcactgcaatctccacctcctaggttcaagcaattctcctgcctcagcctcccgagtagctgggatcacaggtgcccgccaccacgcccggccaattttttgtatttttagtagagaaagggtttcactgtgttagccaggatggtctcaatctcctgaccatgtgatcctgccaccttggcctcccaaagtgttgggattacaggcgtgagccaccgtgccccgccaagcgaacctttttaaatggggacatcctcattctaaggcaagcactgaagagttccagaatgttcccgcaggcccacccgcaggaccaatgcacggactccgtgccactttgtgatggattgtagtcatgcgtgtctactgaaaagccttacatattgtgccttgggtgctgccctgtgttccgaagcttgcttctagggcctgtgcactcagccgtgaacatttaaatggcagctttgagacaaggcctcagctgttctctggtccagacataagaagccagagctttgaaaatggacccagttcggccaggtgcagtggctcacacctgtaatctcagcactttgggatgccgaggcaggcagatcacctgaagtcaggagtttgagaccagcctggccaacatggtgaaaccgcacctctactaaaaaataaaaattaaaaaattagccaggtgtggtgggcaggtgcctgtaatcccagctactcaggaggctgaggcatgggaatcacttgaacccagaggttgcagtgagccgagaagtgcaccactacacttcagcctgggggatacagtgagaatctgtctcaaaaaaaaaagaaacaaagaaacaaagaaaatggacccagttaaacttgtatgaatttgagaaagttttttttaaccattctgggccctagtttcctaatttaaaaaagggaagaggtgagccagacactgtggctcattcctataatcccagctacttaggaggctgaggcaggaggattgctaaaggccaggagtttgaggccagcctggacaacatagaaagacccctgtctccacaaaaaaaaatttaattagctagtgtggtggtgtccacctgtagtctcagctactcagaaggctgaggcaggaggatcacccgagcccaggagttcaaggctgcagtgagctatgattgcaccactgcactccagcctgggcaacagagcgagaccctgtctctttatttatttggttttttttttttttgagacagagtctcgctctgttgcccaggctggagtgcagtggtgcagtcttgactcactgcaacctctgcctcctgggttcaagggattctcctgctgtagcctcccgagtagctgggattacaggtgtgcaccaccatgcccagctaatttttttgttgtttttagtagagatggggtttcaccatgttggctggtctggtctcaaactcctgacctcaagttatccacctgcctcggcctcccaaagtgctgggattacaggtgtgagccaccacgcccggccccctatctatttaaagaaaaaaagagaagaagaaggaatttgcacatatatcctatatatttgcacaaataaaaaaataaaaattaaattaaaaggagggaggagtaattaaagatatgattttccaagattgtcctaaaaataaaaaagagagtatgagtgcctatggcactgattggcatgtggacaggataacgtgcttcataaatgttaataagaaaaataaataggccttcctatttgagacttaagggcgtttgatatcaccatctctccagaaaggaccatctgaaacatcctctcttagttcccattaacctctcactgtgatttatagcagaagttagcagtcaacgtcctgcaggccagatacagcccactatctggttctttacagaagtctgcaaatcctagatttagaggtcagattttcatctctcagccacaaacacattccaacctcatatcttgctttcacccagcctttactaaccacctgctatatgctaggctctggtgaaacataaccaataagataaagtccatgcccttttggaggtcacacctcggagtatgggtgggaatttgttcatttcacttaatttaacaggcctaaccaggtgcagtggctcatgcctgtaatctcagcactttggggggccaaaggtaggcagattgcttgaggtcaggagtttgagaccaacctggccaatatggtgaaaccctgtctctactaaaaatacaaaaattagccagacatagtggtggatgcctgtaatcctagctactctggaggctgaggcaggagaatggcttgaacccaggagtggaggctgcagtgagccaggatcgcatcgctgcactccagcctgggcaatagagtgagactcctttcaaaataataataataattattattattattattatttaactggccattcctgcttataatgtgagatgcactgtcctaagcatttttcaaatgcttaattcttgtaatgaccctatgaagtgactgctatttttttcctgcattttgcaggcaaggaaacagaggctcagagaggtgaagtcacttgtccaaggtcacacagcaaatagttagaaccagggtgtgaatccagccagactagctccagagccaataagctccacagtctccttattcagaagcccttgacctagcatacagatggaggcactacacataaatattgaccaggcggtgcccagaccacagaaggaaaaaaaaagaaagtgacttatccttcaagacactgttatttgaacctggccttgtcagtgctctctcccagactttctgcactaggaactgttgttatcttccttcagtgctcagagaggctgtggcagttgcccagggtcgcccagctctaacaggatgagctgggattttcaaggtggctccttttgtccccagatctgtcttttgcaacatatgtggggccctccagaggaatttcaccaggcaagaatggccttcttggatggcaaaggaatacatttgatttgcaacgtggcatttcagagagatagtgggattggggttttgttattgtagctctttgttttttgctttttggtgttttttgaggagtctcgctctgtcacccaggctggagtgcagtggtgtgaccttggctcactgcaacctctgccttctgggttcaagcaattctcctacctcagcctctcgagtagctgggactacagatgtgtgccaccaccacgcctggctaatttttgttgtttgttttctgtttttttgtttgcgtgtttgttttttgtttgtttgtttttgtttttttgtattttttagtagagacaagttttcaccaaattggccaggctggtctcaaactcctgacctcagatgatctgccctcctcggcctcccaaaatgctggggataatgggattgttttttaagttcattgtcaccattagattttgacccagcactcatctctatgtggacttggccttcatttcttcaattgtgatctgagcattacaagacctgccctcccaaatgtcgttttcatggttgcaagagacagaggaggtgaaaggactgtgagaatttggaaatatcagaaggtgaggtcttattttattttaatcccagttcggtctctttcaagctggttctagtggccaggacttagagaatgggttgtatgtgccatgctggccttcaggattgtatagatttcatcctaagtttgtttgagacttcacacaaccaagtttgacagacatcacgtgctttctacctgcaaagctctgtgcagagcactcccatagcttcaagggtcaaataagaaaagggacttgcctttgtagagtttaggacttgaagggcagggaaaaggttaatgatcacaatttcattcattctccctttcattcattcagtcgtcctttcattcattcgttcattcgactctatgccaggcatttccaagttcaagaccttgaaaaggcaggagttaagaacatgggctctggattctgacagacctgggttccaaagctggttctaacttattggcttcattatttaacccctctgtgcctcggttgcctcctctgtaaaatgggtactggggttagtaacccatgagctcatacccaaagccccttggcctagggctgggcccatggcgggtgtggaataaatgggaactggtctctgtgtagctcatagacattgtacagctgctgtttgcatgtctgcctcctcctccaggcaggcccccttgagtacagtgcataaatgtggaaccagaagatcccctgggcagagaatggaaaagaaaatagggttcacttgctctaagaggctttcaggtctcaaagccagagccacgaagaggtgatccacatagatgttcaagttcacaggggtccatcagttattcactcaacaaacattggtatctattatactctaggcacttttctaagcactagagacacggtagcagaaaagacagaccagaaacaaacagacaaacctgcccttgtggaactgacaatccaatttagaaagaaacacgtaattttatataatgagcagaatggctctgcaaaatgaacagtcgccccaggagaggggctctacaggagaaggtgacatttgtgctgagaccacagtgtgtgaaggagccagccatgggaagaacattccaggcaggaggaacagcaagtgcaaaggccttgaaaatgcaggggacagaaggaaagccaccgggactcaaccaaagtgagggcaataatgatggaatcatgggcagagagtcatgggcagagccctgcaccaaggttcaagcagttaagggagcctggagtgtggacagacgccatcaaaagaaccctgaaggccgggcgcggtggctcacgcctgtaatcccagcactttgagaggccaaggcaggtggaccatttgaggtcaggagttcgagaccagcctggccaacatggtgaaacctcgtctctaccaaaaatataaaaattaaccaggcgtgatgacgtgtgcctgtgatcccagctacctgggaggccgaggcaggagaatcacttgaacctgggaggcagaggttgcagtgagccaagatcgccccactgcactccagcttaggtgactgagtgagactctatctcaacaacaacaacaacaaaaataaccctgaggtgttgaaaagatagaattttggagtgacggtgacagaataaaagacaaggatcagtttgggcacagtggctcgtgcctgtaattccagggactctaaaagctgaaggagaggcatcacttgagcttaggagtttgagatcagcctgggcaacatagcaagattcaatctctacaaaaaataaagtaaaatataatagccaggtgtggtgccacatgtctgtaatcttagttacttgggagactgagttgggaggactgcttgaacctgagagtttaagagtacagtgagctatgattgtaccactgcactcctgcgtgggtgacagagtgagaccctgtcaaagaagaagaggaagagaaagaggtagaagaagaggaggaagtggaagaggaggaaagacagggatcagcggtaggcaagcagaagtatgcagaccccacaagaagaaaagagggccaggcgtggtggctcaggtctgtaatcccagcactttgggaggctgaggcaggcggatcacctgaggtcgggagttcaagaccagcctgaccaacatggagaaaccccgtctctactaaaaatacaaaattagccaggcgtggtggtgcatgcctgtaatcccatctactcaggagcttgaggcaggagaattgcttgaacctgggagacagaggttgtggtgagccaagatcacaacattgccctatagcctgggcaacaagagcaaaactctgtctcaaaaaaagaagaagaaaacgaagacaggaggccggacgcagtggctcacacttgtaaccccagcactttgggaggccgaggtgggtggatcacctgaggtcaggagtttgagaccagcctggccaacatggtgaaatccagtctctactaaaaatacaaaaattagctgggcgtggtggtgtgcacctgtaatcccagctactcgggaggctgaggcaggagaatcgcttgaacctgggaagcggaggttgcagtgagctgagatcgcgccaccgtactccagcctgggtgacagagtgagactctgtatcaaaaataaataaataaataaataaataaataaataaataaataaggcatagttgttcccaggattggaaacccaaggtacagataaattctagatggaaaagtcacattgaacagagaggataatttggcagtgggggtggtgggggatatttgttcataagctgcttgggtttcaaggaccagcatggagaatctgatagaccaaaagagataggggagccccatctctggggggccctacccagaccttccatggctgccaaagctgctaattcaaagaacaaaagaagggtctctctgcaccaaaagtcagccagctgcactgaaaaagaagctccctgggaccagacctattttttttaaatatcaactaggctagaattggccagcctgcctcccttaagaaaagaaagaaagaggccgggcgcagtggctcacgcctataatcccagcacttcgggaggccgaggcaggtggatgatttgaggtcatgagtttgagacaagcctggccaacatgctaaagcctcatctctactaaaaatacaaaaattagccaggcatggcagctaatcacagtgggtccctgtaatcctagctacttgggaggctgaggtgagaatcacttgaacctgggaggcggaggttgcagtgagctgagatcatgccactgcactccagcctggacaacagagcaagactcctgctcaaaaaaataagtaaataaaaagaagaagaagagaaagagagctctgatttctaagtaggttcttttttaaaggttaggttgcagtttaattgtgatgtctaaacaaaacaacctgcttttctttctttttttttttttttttccaagacagggtctcactctgtcacccaggctggagtgcagtggtgtgatcatcactcactgcagccttgaactcctgggctcaagcaatcctcccatctcaccctcccgagtagctgggactacagttgggcaccactacacctggctaattttttttttttttttaattacgtgagcatttttcgtagagacgaggtctccctatgttgcacaggctgaccttgaattccggggctcaatcgatcctcccacctcagcctcccaaagtgctgggattacaggcgtgagccaccgtgcccagcctcttttttttttttttaactgtgtaaactgaggcctcaaaatgcttaatggcatacccgctacagaaacagaaaactattaccaagtacttactatgtggctgcactgttctaaatgctttctatgtaataatgcagtgaacttaatctttgtaagagccccagagatgggtgctattgttttccccatttgacagagagggaaactgaggcaccgaaagggaaaggaaccctcctccccagaatcagtcagcaagtggcagagttgggatttgaaccctggccggggcactcaaccacaccccagattgaagccaggtaagccccacacttgacctcaggacctgcttgtaacccatcagacctcagggagccctgcaaagccccgagtccgcccctgccgccccagttggtctttaccaagccctttgtgcatgaaaaagcaatagccatatatgtaatgattagttatcacatgatgggaattcaattattgatttggggctgacttccatttctcggaacaggcagaaaggaagcggcagggaggtgggtactccggagagcgagctgagcgctctgctgcccggcgcctgccaggctggggagccatggcgccacctggtggccagtcttagcagcggcgggcgacagtgggtgaacgcaggggagacccgcgcaggctgctttttgagcacagtgtgtgtcaggcgctgttccagctcaggggtccaaaaacctcttcgataaaggacctcagatgaaatgcttccggctctgagggctagacagtctctgtcccagagacagctctgccgttgtaacacaaaaggagccacagacaacatcagcacaaatagaaaaggctgtgttccaataaaactttatggacaccaaattttgaacggcatacaactttcacctatcaagaattatccttctttttattatacgacaacaaaaattaatgaacgggtcgggcgtggtagctcacgcctgtaatcccagcattttgggaggccaaggtaggtggataacctgaggtcaggagttcgagaccaacctggccaacatggtaaatgaaaccccgtctctactaaaaaatacaaaaattagctgggcgtggtggcgcgcacctgtagtcccagctactccggaggctgaggcaggagaatcgcttgaacccgggaggctgaggttgcagtgagccgagatctcgcccctgcacaccagcctgggtgacaccagaccggcccacgtggagctcacagagcaaatatggcagcaacaagggagaaagccgatgcgtaacacatatgagctggtcgtgagtgctagtggggaaaattaagcggggcagggaaccaacataagtaggggttgcattttattttttttcaattctatttatttatttagagataggatctctctctgttgcccaggctggagtgcagtggtgcaatcatagctcattgcaaccttcaactcccaggctcaagcagtcctcccacctcagcctcctgagtagctgggactacaggtacgcatcaccatgcccagctaatttttgtaaagatggaatcttgccatgctgtccaggatggtctcaaactcctgggctcacaggatcctcctgccttggcctcctgagtagctaggactacaggtcccagtacagtcaacgagggaggaagccccatatgtaacacataggatctggttatgagtgctagtggggaaaattaagcggggcagggaataagcacgagtagggctgcattttattttatttttatcttatttatttatttatttatttatgagacagggtctcactctgttgcccaggctggagtgcggtggcacgatcatggctcactgcagccttgacctcccaggatcaaaggatcctcccacctcagcctcccaagtagctgggaccacaggcgcacaccaccatgcctggctaatatttttttgttttttgtggagatgcctcactatgttgcccaggctggtctcaaactcttggcctcaagtgatcctcccgccttggcctcccaaagtgctaggattataggcatgagacactgcacccagccggggctgcattttaaatagggtgatgatgaaaagtttgatgaggaggaaacctttaatcaaaggctggaaggaggcaaggaagaagccgtgtgggtgccgaggagaagagcattcctagcagaaggaacagccagtgcaaaggccctgaggctggaccaccctggtgcattggaggaacagtgataaggttagtatggctgcagcacagtgcacgagggagagagaggagggaggtgagggcagggaggtgacaggggcagggccttatgggtcttggtgaggactttggcttttgctatgagtcaggtgggagccatggagggttctgagcagaggagggatataatctgacttgtgttaaaatatgatctctctggggggctgagcatggttgctaacacctatgatctcaatgctttgggaggccgaggcaggaggatcacttgaggccaggagtttgagaccagcctgggcaacatagcaagaccctgcctctacaaaaaaatttaaaaattttccaggagtggtgacacgcacctacggtcctggctgctcaggtgaccgaggtgggaggatcacttgagcccaggaggtcaaggctgcaatcagccatcattgcaccactgcactccagcctgggtgacagagtgagaccctgtctctaaaaataaaataaaagtctcactttgtgtgtctcattctctcagctcaggcctcggggaccaggacaattcaggccacccatccgatccctagctgggaaagtcacccagtcctagctggtgacctgcagtttggctgagcctgggtccccatatcctataagtggtcagttctggcctggaattcaaggtcacaccatctctctcttggcttggctctcaaatgcctcagtaacctggaattcacctctccgggtctgttcacccatctgcataagggacaaaataataagggtactaccggtcataacaagtaatcatggccgggcgtggtggctcactcccataatcccagcactttgggaggctgaggtgggtggatcacctgaggtcaggagttcgagaccagcctagccaacagggtgaaaccccgtctctactaaaaatacaaaaaaaaattagctaggcgtggtggtgcatgactgtcatcccagctatttgggaggctgaggcaggagaattgcttgaacctgggaggtcgaggttgcactgagccgagatcgcgccactgcactccagcctggatgacagagtgagactctgtctcaaaaaaaaaaaaaaaaaaaagtaatcataataagatactaagtaaccacaataacaatagcaacaagagctgccctagctgtttcaggagatcgttgcgtgcatttgataagatgtgctgcaacgaaacactttggaaaacaataacctgcaccacaatctatttataacaatggtgatgaggactaatcgagtcaatgcatgtaaaggtcttggagccgtgccccacagatagtaagtgctccatcaacactgggtttttgtttggtttttgagacagagtctcactttgtcgcccacgctggagtacagtggtgtgatctcggcccacggcaacctcccctcctgggttcaggcgattctcctgcctcaccctccggagtagctgggactacaggcacgcaccaccacacccggctgatttttttgtatttttagtagagacggggtttcaccatgttggccaggctagtctctaactcttgacctcaagcgatccacctgccttggcctcccaaagtgcttggattacaggcgtgaaccgccatgcccagtcaatactggttattgccgggcacagtggctcatgcctataatcccagatagtccagaggctgaagtggaaggatcgcttgagcccgggagtttgagatcagcctgggcaacatagtgagacccccatctcaaaaaaaaaaaaaaaaaaaaaacacctggttgggctgggcgcctgtggaattacgcgcctgtaatcccagcactttgggaggccaaggcgggtggatcacgaggtcaggagatcgagaccatcctggctaacacagtgaaaccccgtctctactaaaaataccaaaaaaattagccgggcatggtggtgggcgcctgtagtcccagctactagggaggctgaagcaagagaatggcgtgaacctgggaggcagagcttgcagcgagccgagatcgcgccactacactccagcctaggtgacagagcgagactccgtctcaaaacaaaaacaaaaacaaacaaacaaaaaacatggttattattattattatggcctaagaagtattattaatgatactcatggtagttcccttaactctcctctctctgctccccattcacactaatgttctctctattctctgatgaagatgacggttcagcagctcgctgcttacacccaggcagcgtcagcctcacctggcagcctgttagaaagaaatgcaaaatcccaagtcttagcctagacctgttgaaacagaatctgcatttaacaagaccccataggccaggcgcggtggctcacacctgtaatcccaagattttgggaggctgaggcaggaggattgcttgagcccaggaggttgaggctgcagtgagccatgatcgagccattgcactccagcctgagtgacagaacgtgactctgtctcaaaaataaaaataagaaaagtattgagttttattagtccttaactgatggttgacccaaatccacttgactggctggcactggctctcattcactgtcagtcaatgcttttactcaagagatattttatgagcacctactgggtgctggcctcagtctctggggatacagctgtgaacaggacagacaagcaacctgattggggatactccagtgggcaagacagaccactagaaatgagataaataacaattccagtgaatggcaatgtattgcagtctgcttagacctgcatgagtgattgatggactgggatgttggctgataaagtggacacgtggctttaaaagattcctgcctagaaagcaaatattgagaccggacgcagtggctcacacctgtaatcccaacacattgggaggccaaggtgggcggatcacttgaggccaggagttcaagaccagcctagccaacatggtgaaaccccgtctctgctaaaaatacaaaattagctgggcgtggtggcaggtgcctgtaatctcagctacttgggaggctgaggcagaaggatcacttgaacccgggaggcagaggttgcagtaagctgagatcacgccactgtactccagtctgggtgacaaagcaagactctgtctcaaaaaaaaaaaaaaaaaaaagagagagagagagaaagaggattgaagaagatagtaacagaagcagaaatgagcaaagagaccaaagtctgtcagtcatgagaagtaatcacggtggtgatctaattcaatcgctatcagaaggtggccagaaaacattcagaattctcatgaagacaatcggtgaggtgaaatcacgtaagcctcactgtggcatgtaccgtgcctgggtggggttcctactggtggacaaaaccaccacagttataaaaataaagcttccaaacagcaatgaagaatggaagatgcttaggagatgcagtagcttacatgtataatcccagtgatttgggaggctgagacaggaggatcacttgaggccaggagtttgagaccagcctgggcaacatagtgagaacttgtctctacaaaaataaaaaattagccaggtgtggtggtacactcctgtagtcctagctactggggaggctaagaagggaggatcacatgagcccaggggttcaaggcttcgctgagctatgattgcccccactggactccagcctgggtaacagaggaagatcctgtctctaaataataataacaataacaataataataataggagacattctacaggatgatttatctggtttattctcagagtcaatagggtagaaaataggggatcagaaagagactgctgtagactaagtaagacatagaagacatgactaccagaaaattaaatatagaattatcatatgatccagcaaccctgcttctaggaatatatctccaagaatggaaagcagggtctccaagagttatttgtacacctatgttcatagtagcattattctcaatagcccgaaaatagaagcaacccaagtgttcatggatggatggatggatggatggatggatggatggatggatggatggatgggtgggtggatggatgggtgagttggtggatggatggatgggtgggtggatggatggatggatgggtgggtggatggatgggtggacgggtggatggatggatggatggatggatggatggatggatggatgggtgagtaggtggatggatatgtgggtggatggctggatggatggatgggtggatgggtggatggatgggtggatgggtggatggatgggtgagtgggtggatggatatgtgggtgggtggatggatatgtgggtgggtggatggatgggtggatggatggatggatggatggacggatggatggatggatggatagatggatagatgggtggatggatggatggatggatggatggatggatggatggatggatagatggacggacaaaatgtggtctattcatacaatggaatattattcagctttaaaaactaagaaaattctgacacatgctacaacatggataaacctggaggacattatgcttagtgaaataagctagacacaagaggacaaatgctgtatgtttctacttatatgaggtccccagagtcatcagattcatgagacagaaagtggaatgatgggtgccaggggctggggagtgagtgtttcatggagacagagtttcagtttggagtgatgaaaaagttctggagatcagccgggcatggtggctcatgcctgtaatcttggcactttgggagctgagcggggctgaccacttgaggtcaggagttcgataccagcctgtccaacatggccaaatcccatctctactaaaaatacaaaaattagctgggcgtggtagcaggcgcctataatcccagctactcgggaggctgaggcaggagaatcccttgaatccgtgagatggaggttgcagtgagccaagatcatgccactgcactccagcctggaagacagagcgagactctgtctcaaaacaaacaaaacgttctggagatggatggtggtgacggttgcacaacaatgcgaatctacttaatgccactgaactgtatgcttaaaaatggttaaaatggtcaattttacgttgtgtgtattttaccacaataaaaagagagagaaacgatgaaatgcaacacacaagccttcttgattcaaaaaactcaactgtaaaaagatgagcaaggaaatctgaatgtggaccagaaattagatataaaaatcatgattaatattgtcagtgtgatgtgattaagatgtgtctgtgtgctttagagatgtagtctgaagtttgcaaaaatcacataaggtcagggatttacttttaaacatctcagaaagaggatatggatttatgatgtgagtctggcacaatcctgataattattaaattttaatggatacgaaagtctcactgacctctttttcctacttttagtgtattggaacatcttcagaataaaaagctctcacagagcacggtattcaaaaagcgaaggcaaacttctaaaacataagggtagaagcgtgttgtactattaaatcaaactattaagccatttggaaatatatatatcttgttgatgtctcatccttttcacgtttttatttttatgtgtattttacagtgcatataacacatttagcaaaatatttttataaattatatataactaaaaatgcatgggccgtggctacgcatttcagctatgagtgtgctcaaaaattgttttgctggctggggtaggagttcagaagtttggagatcatggctataaggacgctttgggccaggcatggtgactcatgcctgtaatcccagcaatttgggaggccaaggcaagagggtcgcttgagcccacgagttcgagaccaacctgagcaacatagcaagatcccatctttaccaaaaaaaattgtttttaattagctgggcatggtgtcatgcacctgtagtcccagctacttgcaaggctgaggtgggaggatcgtttgaacccaggaggcagaggttgcagtgagccgtgatagggccactgcactccagcctgggtgacagagcaagaccctgcctccaaaattaattaattaattaaaatttgtaaaaatgaaaataaattaaagaaacttttatgggttctagaaaccaaggcagacgttaaagggaataggtgcttttcctggttatttatggaatgatggatgggtggatggacagattggtatataagatgataggtgggtggatggacggaagaatgaatggaagaatggatggaagaatggatggatgaatgggtgaatggaagaatgggtgagtgggtgggtgggttgggtggatggatagatgtgtggacaggtgggtgaatgggaagttggttggatggctggaaaatggatggatgggagaaagaacagggaggtggatgaatggattgatgggtagaaagatggatgggtgatggacggatggatggatggatgcatgcacaattagaagtttaaatgggtgggtggtgggtgggtgagtggacagatgagtggatggaggggaggttaagaggaacccagttttgtggcaggtggtggggaagtcacaacatgccttcctaaatgatgctcaaacacgccagtagatgtcagactaacctcaggaaaccacctcggggccaagcttgcaccaccctggccccatcctgaagttctttgattcaaaatgagcaaaggctcattttaataaaacagtttgcattgcaccctgtatttacacactccctcaccagcaccctcccaactcaaatggcatttataaccccacttcctctcctgcaaatggaaaaatggggccagggtgggtgtctggtgaagggtgcttcccacagggtcaggtcgggagcatcaagagggtaagagagtaaattttggggtcccctaaattgattagtatccatatcagcctcagctccaatcaaaataatatttatattctcatcccacactcctgatgtctgctcaggaatccaccctaggcctgtgcctttgccaaaaaaaaaaaaaaacttttgaggaaaaggaaagtaaaggggaaggggaaagggaaagagaaaagaagagagggaagggaagggaagggaccctgtctcaaaaggaaagaaagaaaagagaaagaaataaaaagaaagaaagaaagagagaggaaggaaggaaggaaaaaagaaaagaaggaaggaaggaaaaaagaaaaggaaggaaggagagaccctgtcaaaaaggaaggaaggaaggaaaggaaggaaggaagaaaggaaagaaggaaaaaaggaaggaaggaggagagagagaagagagacactgtcttaaaaggaaatgaaagaaaagagggaaaggagagagggagggaaagaaagaggaaggaaggaagggagggagggagggagggaaggaaggaagggagggagggagggagggagggaaggagggaggaaggaaagaaaaaacccagtagctcccccactgtgtggaaaaggatgcgtaggggccggcctgagactgaaccttcacacaaaccaccttcaaccctcgaacagccaagaccccagctcaggaaagccattcatccaacattgcccagcagcaactacatgacagagccagttccacccccagtgtctcccaccagaagacccacttttggggtcactgacaaagagaaagggggacccagaaccagactcaactgaagccaccacgtactcccagccctatctaggtccctctctgccttcacacacttctgtcttcagccctgaaacccgcagatttcaactcaacactggaagtagaaatgggattcccacgtttttccccagaaagcagcatttctcagccatctcaacagaaatatttgctggctgagcgcagtggctcacgcctgtaattctagcactttgggaggccaaggcgggtggatcatttgaggtcaggagtttgagaccagcctgaccaatatgatgaaaccccgtctctactaaaaatacaaaaattagccaggcatagtggcgtgtgcctgtggtcccagctacttgggaggctgaggcagaagaatctcttgaacccaggaggcggactttgcagtgagccgagattgggccactgcactccagcctgggtgacagagcaagattcagtctcaaaaaaaaaaaacaaaaaaaaaaaccagaaagaaagaaagaaagatttgccaacccatcagagtggacactcacaatcctgggagcctggtcctggctgccccatccatggttaatctctgttgcctcagcctggggcagctcagggattcacagagccggatgggggtgtccggggggcataaggcaaccagtattgatcagttagcagggaaggattttgagatttcagaagccagcacagccttatcaatatgttccagctgcatgaatttgctccccgaaaaagctcgccaaaaacatcctaacccccaagggatccccggtacagccgcaccgccccccgatcaccaccacccaggcatactcactcccattctttcctcctggcctggggggtgctgtggattttgtgggcctggtgggccaagatgacatctcggtgatccaccacgccgccccgccgcctcagaggggggccctcgaagcagatgctgagccggggaggccgagtgtcctgcagggcgctgggcgtgccccgagctgcggttgtgcagggcgtcatagtaactggggcgcgagagcatggagtcggggacccaggaagacttcaacatccacgggcctcgctcagaaatcccagggtcttctccctccagcacagtgagggggaaactagaagaagaaagaggagacagagagggccagtgtgagggagaggcagacagagctcacagagggcaaggagaagggaactcagaagacaaggagaggccgccccaccctccttcgcagaaagtcaaaatacaccccagcccaggctggccgggatttagtagttccttggcaactcagggcccagaaagccagttcttaggagctgcccggcaacatatgtgccccatggagcaaaacactatgaggctgtgccgcgggcactcgctccacctcccaggtgccggccacagagggcgggatgctggatttctcagcatctctatgtctccttctgcaaaatgagccaccatgggcctgggggttggctctccctcagtcccttggtcctgtgagctctggaaagctgaaagggtgagttcaagaggcagttttaaacgcacgtggaaggctgggtgcagtggctcccccaggtaatcctagcactttgggaggcagaggtagccagatcacctgaggtgaggggttcgagaccagcctggccaacatggtgaagccctgtctctactaaaaatacaaaaatttagccgagcatgatggcccatgcctgtaatccacatgcctgtaatcccagctgctcaggaggctgaggcaggagaatcgcttgaacccaggaggcagaggttgcagtgagccgaggtcccaccactgcactccagcctgggtgacagtgagactctgtctccaaaaaataaataaataaataaataaatccacatgtgagtggccacctgtccagccacactgcttctcaccaggttctctgtttttttaacttcatttttatttttttttagagatggggtcttgctatattgcccaggctggtctggaactgctgggctctagcaatcctcctgcctcagcctccctcttgagtagctggaatgacaggtgcacgccaccacaccaggttacggctctttggtttgtttgtttgtttgtttgtttgagatggagtcttactctgttgcccaggctggagttgtggtgtgatcttggctcactgcaacctccacctcccgggttcaagcaatgctcctgagtagctgggactacaggcgtgcgccaccacgcccagctaacttttgaatttttagtagagacggggtttcaccatgtttcatgtttcaccatgttggccaagctggtcttgaactcctgatctcaagtgaccggcccgcctctgcctcccaaagtgctgggattacaggcatgagccaccgtgcctggccaacagctggtttttggaaagagaaaagagacagggtttcctccactcacacatttatcaggtggacactcaacacaccaaaggaccttgaagccccaagatttttatctccaatcacttaatcattcaacaaactctgagcgaccacccaatttgtgcctggccctgtgctaggtcctggggacgcagccatgaataagactggcaaatgtccccaccctcatggagaaggcattctaggagggagacagacaaggaacaaaataagtgggtacattatatagagattaggagttgaaaagtgctgggaagggccaaaggaccaggtgtggtggctcatgcctgtaatcctagcactttggcggtcagattgcctgagcctaggagtttgaggccagcctgggcaacatagtgagaccccatctctactaaaaatacaaaaattagccaggcatggtggtgcatgcctgtagttctaactacttgggaggctgaggtgggaggatcacttgagactgggaggcagaggttgcagtgagccaagattgtgccactgcactctagcctgggtgacaaagccagaccatgtctcaaaaaaaaaaagtttttaaattgacaaataaaaattgtatatatatatataggccaggcgtggtggctcacgcctgtaatcccagcactttgggaggccggggcgggcggatcacaaggtcaggagattgagactatctggctaacacggtgaaaccctgtctctactaaaaatacaaaaaaatagctgggcgtggtggcgggcgcctgtagtcccagctactcgggaggctgaggcaggagaatggcatgaacctgggaggcagagtttgcagtgagccgagatcacaccactgcactccagcctgggagacagagggagactccatctcaaaaaaaaaaaaaaaagattgtatatatatatatgcacacacacatgcacatacatacacacatacacacacacacatatatatatattttttttgagacaaagtttcactcttgttgcccaggctggagtgcagtggcatgatctcagctcactgcaccctctgcctcttagtttcaagcaactctcccgcctcagcctcccatatacctgggattacaaaattgtacatatttatgatgtctaacatgatgttctcgaacacgtatgcattgtggaatggcaaccttgagctaattaacatgcattacctcacacacttactgaggtctttttgtggctaatctcttcttataagaacacgagtaatattgaattagggctactcatctgacctccttttaccttaattacctttgtaaaggtcctgtctccatatacagccccattctgagatactggagtttagacttcaacatatgaatttgggaagacaccattcagtccttaacaaagaagggtaaggtgtgtaggctggctgcctacaccagctcatgcctgtaatcccagcacttgggaggccaaggcaggaggatcacttgaggccaggaattcaagaccagcctgggcaacataacaagaccctgcctctacaaataatgttttaaaaatcagccaggcatggtggcacgtgcctgtagtcccagctactcaggaggctgaggcaggaggattgtctgagcctgagatgttgaggttgcagtgagccgtgattgtcccactgaactcctgcctgagcaatggagtgagaccctgtgtgaaagaagaagaagaagaagaagaagaagaagaagaagaagaagaagaagaagaagaagaagaagaagaagaagaggaggaggaggaggaggaggaagaagagggagaagaagaagagttgggtagactggtgactttattttatttatttatttatttatttatttatttatttatttatttatttttgagacggagtctcactctgtcatccaggctggagtgcagtggtgtgatcttggctcactgcaagctccacctcccgggttcacgccattctcctgcctcagcctcccaagtagctgggactacaggcgcccgccactacgcccggctaatttttttgtatttttaatagagaaggggtttcactgagttagccaggatggtctcgatctcctgacctcgtgatccgcccgcctcggcctcccaaagtgctgggattacaggcgtgagccaccgcacccggcccgactggtgacttcattaaataggggtgcagagacagcctcactgaggaggtgacatctgagagaggcctgagggaggtgaggagccacatgggtatctgagagaagagctttccaggcagaaggaacagcacatgcaagggtcttgaggcaggactgtgtgtctcaaggaacaaagaagaggcccgtgtggctgtgggtgacgtggtccgtggcttttggaatctacacctcacccaaaagcatatttccagtcccagactgatttttcccacctgagtcagcccctacaactagcctctcagtgtctgtccaagaaaagcgtatctgctgggaggctggcatgaatgaaatagaattaggccatgcacagtggctcatgtctgtaatcacaacagtttgggaggccgagggaggaggattgcttcagcccggaagtttgagaccagcctgagcaacatagcaagaccctgtctctaaaaacaaaaacaacaaaaataaactttgtttaaagaaattagccaggtggcatgtacctgtagtcctagacactcgaaaggcatagatgggaggaaaccttgagcccaggagttcgaggctgcggtgaattattattgcaccactgcattccagcctgggctacagatagcctaccttgttagaaagaaagagaaggaaggaacgaaggaaggaaggaaggaaggaaggaaagagaggaaagaagaaagaaagagagagagagagaaagaaagagagaagggagagaaagaagagaggatggaaagaaaagagagagaaagagaggagagaaagaaaacagagaaagaaagagagaaagagaaagacaaagaggccgggcgcagtggctcatgcctgtaatcccagaactttgggaggccgaggcaggaggatcacctgaggtcaggagttcaagaccagcctggccaaaatggtgaaaccccgtctctactaaaaatacaaaaattagccgggcatggtggcgggcacttgtaatcccagctactcgggaggctgaggcacgagaatcacttgaacccaggaggcagaggttgcagtgagccgagatcgtgccattgcactccagtttgggtgacagagtgagactccatcaagaaagaaagagagagagagagagagtgagagagaaggaaagaaagaaaaaagaaagaaagagagaaagaaaggaaggaaggaaggaagagaagggaaggaggaaggggaaggggaagggaagggagaccctgtctcaaaaggagagagaaagaaagaaagcaagaaagaaagaccccgtcaaaaaggaaggaaggaaggagaaagaagagagagaaagagaagaaagaaagaagagaaagaaatgagagagaaaaaaaagagaacggagagaaagaagagaaagaaagacaggagaatgaaaaaaacagagagaaagagaaagaaaagaaaggagtgagaaggagaaaaagaaaaggaaaagagagaaagaaaagagaagaggaagaagagagagaaaaagaaaagagaggagagaggaagagaaagaaagagaaaaagagagaagaaagaaagaagagagacaaagaaagaagagaaaaagaaagaagagagaaagaaaagagaaaaaggaagaaaggagaaagaaaagaaagaaaggagaaagaaaagagaggagcgagaaagagaaagaaaggagagagaaaaaggaaaaagaaagaaaacaaattaagaagctcaaccctatacagaaacatttcacaagtcacttcaacacccacaggtataagtaggtggtgcacagaatgaggctgcccccagattgcaaagaaccaattgaaggaaggaaggagggaagaattatctccattccatttcctctcaccctgctttaagcatgcaaagaaatgagaactctcccagcctctcctaagcagatcaactcactatcagcttagcaaatgcagttaccttccggtttctttcgaaatcctataactaatggagtttaatagatctatccttcatgacgcttttaagcttcaatttactccagtgaaacctcactcttaattgcccacgattgtgcatttatagtcttttgtgttttgccaaatactttcccattgtgctgaaaaagaaatctgctttccttttataaccacttctgcacggatgccattcttcttcccatttcacagaaataaaactgaaaacaagaggtagattcaagtgtgttccagctacaaggttttatttcacccctccccaaaaatattcttcctgcacatatatttttttttctttttctttttcttttttttttaagaggcagggtcttgctctgtcgcccagattggagcacagtggcaccatcataactcacagcacccttgaagtcctgggctcaagtgatcctccgaagtagctgggaccacaggcccgtgccaccacagcaggctaatttttaaaatttttaaatttttcttagagataggatctccctatgtggcccaggctggtctcaaactccttgcctcaagtgatcctcctgtctcagtctctcaaagctccgggatgataagtgtaagccaccgcgcccggccacaacgatattaaagaaagaaaaaatcggctgggtgcagtggctcacgcctgttatccagcactttgggaggccgaggcaggtgggtcacttgaggtcagcggtttgagaccaatctgaccaacctggtgaaaccctatctctactaaaaatacaaaaattagccgggtgtggtggtacacatccgtagtcccagctacgtgggaggctgagtcaggagaatcgcttgaacctgggaggcgaggttgcagtgggtggagattgtgccactgcacttcagcctgggtgacaaaaaaaaagagaaagaatccagtttacaggttgggtgagctgtgtagtacctacacattaactaaaatcccagaaaccagacacagtgcaagaactttgacggcaaaaattctgaacaagccaggctctgtggctctcacttgtggtcccagctactaaggaggctgagacgggaggatcagcccaggaggtcgaggttgtagtgagcaatgatcacgctactgtactccagcctgggtgacagagtaaggctctatctctgaagattaattaattaattaagttctgaaagcagaaggagtgtttctacctgggaaagtaggaagcagatcaggaagtcaaaacctaaagctaatatcccaggtgacatctttggagacgtgcacctgcttatcccacagcctgacatgggatgctcaatttccctctctggtgctatagcacatagctcccatcctcccccatcccattacaggcttccaaattcaccctgatacccaagccagaaattgagttgtcaatcctggcttctcgcttcccttaactccaggcatcaaatccatccgcaggtaccatctactcacctccaaaatatatcctgagggctggacgtgggggctcatgcctataatctcaacactttgggaggctaaggcaggagcaccttttaagcccaggagctcaactgaacaacatagcgaacaacacagtgagaccctgtctgcaaaaaagaatttttttaaatcagccaaacgtggtggcatgcaatggcaacagtaatcccagctactcagaaggctgaggcaggaggatcacctgagctcaggaagttgagactgcagtgagctgtgatcatgccactgcactccagcctggataacaaagtgaaaccctatctcaaaaataaaaataagccaggcatggtggctcatgcctgtaatcccaacactttgggaggccaaggcgggaggatcacttgaggtcaggagtttgagaccaccctggacaacatgatgaaaccccgtctctaataaaaatacaaaaattagccaggtgtgatggtgggcaccataatttcagctactcaggaggctgaggcaggagaatcactttcacctgggaggaggaggttgcagtgagccaagattgtatcatggcaccccagcctgggtgacagagtgagactctgtctcaaaaaaataaaaataaaaacaaggctggtgcggtggctcacgcctgtaatcccagcactttgggaggccgaggcgggcagatcacctgaggtcaggagttcaaaaccagcctgaccaacatggagaaaccccatctgcactaaaaatacaaaattagctgggcatggtggcacatgcctgtaatcccagctacttggaaggctgaggcaggagaatcgcttgaacccaggaggcgcaggttttggtgagccgagatcacgccattgccctccagcctgggcaacaagagaaaaactccatctcaataaataaataaatacatacatacatacatacatacatacatacatacatacatacatacaaaatatatcctgaatccaaccacttcctgcactgcatggctgccaccctcaatcatttggactggggctgccttcttccctactcccactcccaatccattccctcctctgcagtcagtgcagtctttctaaaatgtcaatcaggccaggtacagtggctcacatctgtaatcctagcactttggtaggcccaggtgggcagatcacctgaggtcaggggttcaagaccagcctggccaacatggcagaaccctgtctctactaaaaacacaaaaattagccgggcttggtggcacttgcctgtaatcccagcgagaggctgaggcagaattgcttgaacccaggaggcagaggttgcagtgagctgagatcacgccactacactccagcctgagcaacagagtgagactccatctcaaaaaataataataataaaaaataaaaataaaaaatgtcaatcagcacatttgcttttgctggaataaaagccgcatcctcccaggctgcctcatccctgtgactttgtcccctccccttctccctgttgcacttttagccccagaatcactggccttgtccctgtttctgggctgtgtcaagctcattccaccttcgcacctgctgttccctcttcctggaatgcttttcccctagtctcggacaagccagcttcctgtcgtcatgcaaggctgtgatcagatgccaacttgcagaaccatccacccaaagcaccacccccagcaggcgttctcatcacgctcgcctgtgaggtcttccttaaggtgtttgttgctccctgagaccagtacgtacatgcgggcttctataacatccacctccctgataggatctcagctgaatttgaacaaggatcttggcctgtctcatttgccattgagtctccaataccttcactatttcttgcctgaatgaatgaataaatgaatgaatgaatattcttaggaatgagtctacccaggaaaatgtcattaagccccttccaaaccaccaccaggggtctgtgacttttcaattttatgtatttattttttaatattattattattattatgattttgagacagagtctcactctgtcgtccaggctgcagtgcagtggtgtgatctcggctcactgcaacctctgcctcctggattcaagtgattctcctacctctgcctcctgagtagctgggattacaggtgcccaccaccatgcccagctaatttttgtacttttagtacagacggggtttcgccatgttggccagactggtctcgatctcctgacctcaggtgatcctcccacctcagcttcccaaagtgctgggattacaggcatgagccaccgtgccctgctgttttattattatttttgagatggggtctcactctgttacccaggctggagtacagaggcatgatcctacctcagtgcagcctcgaactcctgggctcaatcgatcatcccacctcagcctctcgagtagctgggaccacaggtgcacaccactatgcccagctaattattttattttattttttgagagacagggtctcgctatgttgcccaggctgatctctaattcttggcctcaaatggtcctcccgcctcagcctcccaaagtgctgggattacaggtgtgagccactgtgcccagcctgggatgtttttctaagcagggaagggataaagtatgcgggaaataaggcatattctggaggaaggtctaacctcttcacacaacaatgaaccgtggggtcccaggaaaattgcctaagcctctgagtctctgctttctcctccacaacgtggggatcatggcaagtacttcagaaagccgttgtcatgaagggttatcaggctcctccatgagaagtcaatgcaacgaacacagcgctgggccacagaaagtgctaggtccacacctagtctagtgttaacctggggcaggtgggcagagtggggcatctgcaggaaagggggacagccactccagctacatcaccaaggacgctttgcagagcactcgtgagcagttccaacggagccccagctgtcctgtgtgtacacacgagaaacaaacacatttccagccaggggtcgctccctccccagccaggtgcctgcgcctggcacctgcgggggccccatgaccaaatgtgctgtcctctctctctctctctctctgtttgcccaacctcagcacggaggaagtggcaaagtacgtgggcttggcttcactgagaatcagcagggttccaccaacagacagcaccaaagagaagacaatagaaaaagtaaacagaagaaaataaacaacacgaagcctgaggccacagaaagcctcattgttaatggaataacaatcacagcacctgcctgatacgccaggtatcggtggtccccaccactttcccacacctgaaacaggagctgagccctccgctgccaagcctggactggcctgaattgccatggcaaccggatggcacctggagatgctcctgattcacacagcctggtccaggagctctaggggaagagacagagagggagggaccacagggaagtctgggggtgctttctgtgaccctcctacatggacagaaacatttacatgtttctgtgacagacaccaggcttcgccacccacaaatgaaagaagtggtcacaactggtaaaaatgagtaaaagatacaccacatatatatatatatattttttttttttttttttttttttgagacagagtctcactctgttgcccaggctggagtgcagtgactcactgcaacctccgcccatccaggtttaagcaattctctgcctcagcctccggagtagctgggattacaggcacatgccaccatgcccggctaatttttttgtatttttagtggagacggggtttcaccatcttggccaggctggtcttgaactcctgacctcatgatccacccacctcggcctcccaaagtgccgggattacaggcgtgagccaccgtgcccggccccttaatttttaaaagtagaggaaaaacattctctgaaactttgcgggttcatcatacacattggaaaagcatgtgatgctggagccaggcatcatggtgtgtgcctgtagtcctagctactcgggaggctgaggccagaggaccacttgagcccaggaggtcaaggctgcagtgagctatgattgcaccactgcgcttttgctggggtgacagagtgagaccctgactcttaaaaaaaagaaaaaaaaggaagaggaaagatgctccttggaaggagatgggagctcaggaagccccaatatgtcctttgtctaaagaattcaatatagagccagggaggggctggactgtaatcttacaagctcttcttttattctctggtgtgggaaaatgtctttttccacccatcttggaggaaaatttaaaaactaaaaatgagaggccaaggtgggagaatcacttgagccggggaagttgaggctgcagtgagctgtgatctcacctctgcactccagcctgggtgacagagcaaggccctgtctcttaaaataaagtacaagagatggacttgaaacactgttgctggctgtgagatgaaggaggccacgagccagggaatgcaggccacccctggaagctgagaatgaccccctgctgacagcaagcaaggaaacaggactccagtcctacacagcatgaaactggattctgccaacaacttaaatgaacaagaaaacagattcttccctagagcctctggaaggaagcacagccaagcaacactttgatttcagcccagccaggcctgttggctttctgacctatagaaactgtgagataataagtgagtggtttgttttgttttgttttgttttgttttgttttgttttgttttgtttgagatggaatctcactctgtcgtccaggctggagtgcagtggtgcaatctcagctcactacaacctccacttcctgagttcaagcaattctcatgccttagcctccagagtagctggaagtacaggcacctgccaccatgccctgttaatttttgtatttttagtagacacggggtttcaccacgctggccaggccagtcttgaactcctgacgtcaggtgatccgcccaccttggcctcccaaagtgctgggattacaggtgtgagccaccacccccggcccactgagtgtggttaaggcatttatttggtggtaatttggtatggcagcaatagaaaaattaataggcagttacatacatgtagaataattttttacaaacatggaatttgtgagattatatatgtgtatatacatacatacatatatattaaaagtctacaacttttttatacttagtaatatgtcttagataacattccacatcagttcctataggaatgtttcttacaaatattccacatcagttcctgtagtttatttttatgttgttttgagatggggtcttgctacgtcacccaggctggggtacagtggcacgatcatagctcactgcagcctcaacctcctagggctcaagcaatcctcctgcctcagcctcccaagtagctgagattacaggcacacaccaccatacccagctttcgatagtatttttcaatgactccatcaaatttatctggtctggacctctgggtctttctgatttcttgctattccccagaatgttgcagccaacgtcctgcattgtagatcttcaggttctgctacaaatatctctgcagaataaatccccagaggtggaattgctctgtcaaagagtgtaagactgggcgaggtggctcacacctgtaatcccagcacttcgtggggtttgccttcgagtggaatatacgcaggtgtggagtcctggttgagagcacagaagtgttcctttaaaagcagcttaaacactttgggaggccgaggcaggcagatcacttgggaccaggatttcaagaccagcctggccaacatggtgaaactctgtctctactaaaaatacaaaatacaaaaattagccaggtgtggtggcgggcacctataatcccagctacccgagaggccgaagcacaagaatcgcttgagcctgggaggcagagtttacagtgagtcgagattgtgcccctgcattgcagcctgggcaacagaataagactgtcttaaaaaaatttttttaataaatatatttttaaaaagcagcttaaaaacaacatctatgtttgaaatcacatctcctcccctcctctctcttgttctctctctctctcgctctctctctggccttgatcctctttctttcacttgtcatttgatcctgtctttctctgtgtgctaagagctccatcaataaaacaccttaatccagccctggacaaaactagggttgctaagacccaggggcatgatcttccctcccaagttctaggctagagagtgtgaaattcagcagaccgtggattctaacagctactaaggaggcgctgggatgaagatcatctaaatgtcatttgtaatcgaccttcagatgcatttgtcaccttccggatgatgttttatttggctgatagtaaaagcggtttccaggccctgaacaaacactctccatggtaggcagccaggtgtggagcaactgctaaggatcttcctagaattgaaaactcagaaccagggaacaacccaaatgtgcgtcgatggcaggatggataaacaaagagatgtggcacggtggctcacgtctgcaatcccagcacgttgggagaccgaggtgggtggatcacctgaggtcaggcgttcgagaccagcctagccaacatggtgaaactccatctctactaaaaatacaaaaattagctgggcatggttgtgcatgcctgtaaccccagctactcgggaggctgaggcaggagaatgacttgaacctgggaggcggaggttgcagtgagccaagatcgcaccattgctctccagcctgggggacaagagcgagacttcatctcaaaaaaaaaaaaaaaaaaaaaaaaaaaaaaaaaaaaaaaagatgtgggtggtgcacacgcacaatgagaagttattcaggcttagagagggaggaaattctggccgggcgtggtggttcatgcctgtgatcccagcatgttgggagaccaaggcggacagatcacttgaggtcaggagttcgagaccagcctggccaacgtggtgaaaccccgtctctactaaaaatacaaaaattagtcaggcgtggtggcgcgtagcctgtaatctcagctactcaggaggctgagccaggagaattgcttgaacccagcaggcagaggttgcagtgagctgagatcatgccattgcatgccagcctgggtgacggagtgagactctgtctcaaaaaaaaaaattaataaatgaatacaggtatcaatacgtggatataggcaccaataagtgggtataagcaccaataagtgaatagaggcatgaatcaatagatgtaggcatggccaggcgtggtagcttatacctgtaatcccagcactttaggaggctgagggaggcagattgcctgagctcaggagtttgagaccagctcaggcaatatggtggaaccccatctctactaaaaatgcaaacaaaaaaagttagccaagcatggtggcacacacctgtagtgccagctacttgggagactgaggcaggagaatcacttgaacccaggaggtggaggctgcagtgagcagggatcaaaccactgcacacagcgagactgtgtctcaaaaacaaaaaaagatgtagaccccaataagtagatatagacaccaataagtggatataggcaccaataaatggacataggcaccaataagtagatataaacaccaataagtaggcataagcatcaataagtagctacagacaccaataagtggatataggcatcagtaaatagatacaggcatcaataagtagatataggcacattaagtgaatataggcaccaacgagtggttatagacatcaataagtagctgcagacaccaataagaggatataaacatcaataaatggatataggcaccaatacatggatataggaaccaataagtagacataggtaccaataagtagatataggcctcaataaataaacataggcaccagtaactagatataggcatgaataagtggatacaggcctcaataagtaggcataagcgtcaataagtaggcataagtgtcaataagtagccacaggcacctataagtagatataggcatcaataagtggatataggcatcaataagtagatataggcaacaataagtggatataggcatcaataagtggatataggcatcaataagtgaatatagacatcaataagtagatataggcatcaataagtggatataggcaccaataagtagatatagccctcaataaatagacataggcaccagtaactagatataggcaggaataagtggatatagggctcaataagtaggcataagcatcaataagtagccgcaggtgccaataagtagatataggcatcaataagtagatgtaggcatcagtaactgaatataggcaccaataggtgggtataggtatcaataagtagctacaggcccaataagaggatatagacatcaataaatggatataggcaccaataagtggatataggcatcaacaggtagatataggcatcaataaatggatataggcaccaacaagtagagatagcatcaatagttagatatgggcatatacaagggtgtttatgctccttctggccacaaccagaagcttccccatctcgggcagggtggaccccctcccccctatctttgcatagacaagcaaccagcaagatgaaagaaaaagtaaagctggggccaagaagagctctcatcacttggggcaaaactccagaactgccccacatacgtgagaacaaagctaaataaaacgccaggccagatggccaaggttgaacgcaagctgagaccagcaagccagcatagccccaagtgtggctgcaagtgttcatcccctggtgagaataaaccatgtcacagctggtctcgtgttccacccacttttttcttcaccagctggacggtgtgatcatggtgcggtgagataaacacgcaccctcccacagagatgaacagatcacccgggattgctggatggttgggcagccccaggacactgagtgaggctgcaggacgggggaaggaggggaggagacccccaggggtacaggctgttgggctgaatctcaggctaaattcttcctcccaacttcacttcgtggctctgttatcctccccatcactcatgcatccattcatcattcattcattcatccagcaatatttattgagcacctactgtattccaggcactgttctcaacactgaggactaagacatgaataacacagacaaaagtccctcctggagctggcgttctaataaaggagatgaacaagaaacaggaaaagctcctgaaatagacagaatgtcagatagagaaaagaaaacggtagaggaggagggggaaggggaagctgactgtcatttaggtaaagtggccagaatggcctcactgagaaagaaatatttgagtaaagacctgaagggagatgaggatgagggaggatgcatgagggtgtctgtgggaagagcattccaaggcagaggaaaaggcccttgcaaaggcgctatggctggccgtgtggctgatgtgttcaaggaacggcacagaggccagtgtggctggagcagagtgagtgagggggccagaaggtgagggcagggaggtaacggggccaggaggtaagggcagggagataaggggaacagatggtacagggtcttgtgggccatagggagaactttggcttttgctctgcatgaggtgggagctatgaaaggatctaaggagatgagggatgtggcctgactcaggtattcatgggagccctctggaggtcacatttgcaagaaaccccaaatgcagtggaatcaatcaccccagacattgtggggttccttccttctctctttccttcacttccacattctactcatcatcagagctgatgactccgccttgtccttcccctcccacttgccgtaggccacattcattcctctctgaatctcgtctcctccaagtcatcataaacaatcagttcatccattagccagtcccctaaagactccccacagccagctgaataaagtgtgagtcctggccaggcgcggtggctcatgcctgtaatcccagcactttgggaggccaaggcaggtggatcatttgaggtcaagagttcgagaccagcctgaccaacatggtgaaaccccatctctactaaaaatacaaaattagctgggtgtggtggcagacacctgtaatcccagctacttgggaggctgaggcaggagaatcacttgaacccgggaggcggaggttgcagtgagctgagattgcactactgcactccagcctgggcaacaagagtgaaactccatctcaaaaaacaaaaacaaacaaacaaaaaaagccaacaacaacaacaaaaaaaagcaatcagttcatccattagccaatcccgtagagactctttccacaaccagctgaataaagtgtgagtcctttcgccagccccatatatgtgccacgatgtagccccagaattccttccatcctcacttctcactacatgaagctgatgctctgagacaatcctgaccacacctctgactttcaccaccctgaatacctttccctctcctcatccccaaggtccagctcaaaatacatttctgcttcacaagcctcttctagaaaatcctaccagtgcccacacctcctgtctgcccatggctccctgcccctagcacctgccgctcccgacctggggctcctctggccgcaggagtgaagcccatctgcaggggacaggtcacaggtgctacccctggaatattcctcaaccaatggctgctgccaggagttggtagagaaatatccccatctttgcaaccagactgcttgggcttggattcaggatcagctgcctcctgctatgtgaccttgggtaaatcgctccacctctctgggccagtttcctcatctgtaaaatggggataataaaaacacatccttcacagtgtcattgtgaggatgaaataacttaattctatgcagcatgcccaggacagtgtcccacacatggtaagccccaatatgagtgtttgctactgttattactgtgtttacaatgatagtttcattctctgttgaatcctcaaagcctagcacagtgcctggccaacaggaagaactcaataaataattgctgaaaggcagattgccaggtgcggtggctcacctctgtaatcccagcaatttgggaggctgaagccagaggattgcttgaggccaggagtttaagaccagcctgggcgacatagggagaccccctatctcaacaacaacaacaaaataataaattagccaggtgcagtggtacacacctgtagtcccagctacgagggagaccgaagtagaaggttcacttgagccctggaggttgaggctgcagtgagctatgatcaagccattgcattccagcctgggtgacagagccagacaaagaaagacagagacagagagagagagagagagagagagagaaggaaggagggaagaagaaagaaagatggaagaaagagagagaaggaggagggaaggatgaaagaaagaaataaaaagaaaggaaagaaggaaggaaggaaggaaaggagggagggaggaaggagaagggagggagggaaggaagggagggagggagggagggacggaaggaaggaaggaaggaaggaaggaaggaaggaaagaaggaaggaaggaaggtaggaaggtaggaaggaaaggagggagggaggaaggagaagggagggaggaaggagaagggagggagggagggaagggagggagggaaggaagggagggagggagggacggaagaaaggaaggaaggaaggaaggaaggaaggaaggaagggaaggaagggaaggaagggaaggaaggaaggaagaaggtggatcaattattcctcttgtccaagcaaggcaaaaccagtggcatcaggtcaatactgaaactgaaccaaatacctggacacttagcaccatgtgtcatcccctgtccaccttctctctctctctctctctctctctctctgtctctctcacaaacttgcttgacttcatcagcattggagaactaaaaggaaacagtacagagtaccaggaaaaaaataaaactcctcccacagggactgtatttctctaatgtttctcccacaaactaaaccatgcatctgttctcttaagtcattcttgggcaggagtgggtgggtaatgttgcttttattctatctccttgaatttttttcctgattaggtattcttgactcctcaatattgagcaactggtaggtgtttcaccatgtccctcatttatcctgcctctttggccagacagtgtctgtgtgtgtcatcaacatattaacatgttaaagcaataattcattatggaggtcattttctggctttttttttttttagatacagggtcttgctctgttgcccaggctggggtgcagtgacacaatcagaactccctgcaacctctaactcctgggctcaagcgatcctcccacctcagcctcccgagagctgggaccacagacattggccaccatgcctggctaattttaaaattttttatagaaacgagatcttgctctgttgcccaggctagttttaaactcccaaactcaagcaatcctcccaccttggcctcccaaagctctgggattacaggcgtgagccaccgtgcccagccctcagtggtcattttgaattctgatatgctttgtttgttcaacaaatatttattaactaccaactgtgtaccactgtgatccaattatcattcatcttgggatcttaagactctagagaaatcacctaaaaactgcctcccggccaggcaccataactcacgcctataatcccaatactttgggaggccaaggcaggcggatcacctgaggtcaggagtccgagaccagcctggccaacatgatgaaaccctgtctctaccaaaaatataaaaaatgagctgggtgtggtggcatgcacctgtactcagctactcaggaggctgaggcaggagaatcacttgaattcaggaggtggaggttgcagtgagccgagttcacgccactgtactccagcctgggcaacagagcgagactccgtctcaaaaacaaaacaaaacctgcctccccttggggggtcaaaagaaaatgtagtgttggttttgctggagagaaaaataactgtacaccaaaagttgtagtccctttggggaaaaaaagtgagtagcccttgagttgagtcctgaaaaaagatgtttgaagatggtgtctgcctaccatcttcaagattttggtgttggtagctaagaattaatgtatgagttagtagggtccatactaactagtagggttctgttactcatgtctgaccaggacgatttcatggagggtaagacaagtggtacaggaagaagaaagaaatgtgaactaaaaaagaaatcagagaccgggcatggtggctcacgcctgtaatcccagtactttgggaggctgaggcgggtggattgcttgagcccaggagttcaagaccagcctgggcaacacggcaaaacctcatctctacaaaaatacataaaaaattagctgagtgtggtggcgcacgcctgtggtaccagctactcgagaggctgatgtgggaggatcacctgagccctggaggttgaggttatagtgagccgagatcgggctactgcactccagcctgggcgttgagtgagaccctgtctcaatcaatcagtcaatcaatcaaatagttaaaatggtatgctctatgtgtttttttaccataatttaaaaagaaattggctgggtgtgttagctcacacctgtaatccaagcactttgggaggccgaggtgggtggatcacccgaggtcaggagttcaagaccagcctggccaagatggtgaaaccccgtctctgctaaaaatacaaaaattagccaggcatggtggcgggtgcctgtaatcccagctacttggaaagttgaggcagaagaatggcttgaacctaggagacggaggttgcagtaagtcaagattgcaccactgcactccggcctaggtgacagaataagactctgtctcaaaaataaataaataaaaaataaaaataaatcaaacacatgctctggagagtaatttgaaagtagccaacatttagtgagcacgtactaggtgcctgccactgggtatcacctgtggctgggcttctcagcaatgctaagacacagacgccatcgtcatccttgcagtcagcagggggcactgaggcacagagggctgagtggctcccctgggtcacacgccaatgagtatgtggcctccagggcttctcagatgctgactggctcatgactcacccagcctcaagttcaaatgcagattctaactcagcagggctgagtggagcctgggactggccaagacctgcactttgaggggaggatttcttccccggaggctaagtcagtcctccctcgtccactggacaaacttggcctataagggggtggaaaatgcttacccagagcgttcgtctgtctgtcactgtggagacagctagggttgaaggatcctggaatagaagctccctcatttgccctgggcccagagggccctctggtcctatgccctaacattttaaataataataataataaatgaaaccctctgccagagcttttgatgtccacgagttttacaggtcatttgctcagtaatttcactcagtgtcaaatccaccctctccctcctgacccctgtaatgatcttctgttttctttttggggaggctgcattgaattgaacccatcttatgtggagggaaagtggcatttgcaccgagtgacttttttttttttttttgagacggagtctcgctctgtcgccccagctggagtgtgatggcatgatctcggctcactgccacctccgcctcccgggttcaagcaattctcctgcctcagtctcctgagtaactgggactacatgcgcctgccaccacgcccggcaaatgttttgcatttttagtagagatggggtttcaccatgttagccaggatggtctcggtctcctgacctcaagtgatccgtccacctcggcctcccaaactgctgggattacaggcatgagtcactgcgcccggccaccgagtgacatcttgatacatctcctgagatctctgtgtcttggaggaaaatggagtatccacacagggataaactcagcctcttagacttctgtagttggggagacttcctgcagcctggtattggggtgttgaggatggactaggggtcacatgggtaaggggaggtctgtgtcagctgtaagcacctgagatccctgcaagcaactgaaggctatccctgaaagagcaggtgcaggacacggcaaggctgccctagagtcactgtctctgaacaggacaggagccctgagccagggatacctagagaatattcctccacagcacctagggctttgaggagaaggaggagagagagaagcttccctcttgttggttcagcctctgggaaggtgctctgacctcctgttgacattctaaattggctccttctcctgggtcagtctctcaggagcctctaaggaaggagcctggagcaatcaacatgatccccatgccctgccgtccccagcagcgtctgttgtacgaagctgttagcttcaaaggaaggagaggggagaagaggaattctgctgccagtttttcccacttattgagaaacaaaagccacccagacaactcggttcaaaattaaagaaaaaaggcggaaggggcaaggggggaatggcttagagggggtgtccagctctttctctgcttttccttcaagtggggcaagagagggaagaatattaaatattaaaaggaagaagtggtttcctaagacgatgtaattattcccaacagcctaaactccatctgccatttatctctcttttcccaacacattcacgccgcgtcgatcacagcaaacaaggcccaggcacacaggcgtcgggaacttttgttcggggtccccaaagccatgggcaattggggggtggggagcggtgaggggatatttcataattctaaatgttgtcacttgttcaaagcagcacgagacttaaaatgtggacttgaatgagggggggtggggaagatataaaaaagtagaatttgacttaggtcagaaattctcattcttgggaaaacgtcacatgttcagggcagatggcaaagacatcggttgctgggaggggggttgccaagggcaattgaatgaaaatggatttttaagaaagaaacaggaatacgctggaaatgaagagtctgccccccttcttcccagcaagagaaactgttcagaaaagggaagaggttcttaaggcagaagcaagtgaaatctggaaataagctgcccgcccgcaaagaaaaactcttcatagagggagcaggggaagatctttgtatttctacctttgcagatggaggtaatttgcagcaaggaaagaaagattaaactccctgcaggactttgcctccagcgtcccccgctctcagaagccccactcacctgtatcgcatcagcgctggggctcaggcgacgcggctagtggtcagcactgcgagtcctccaggggtcccgagggtcccatctcgtcagcacccaggggtccgagctatctgaagtccatgcatccatggcccacccagtggaaagaagaagggtggcccagagacaggagggagaaaagtgggtgccaagaagagcagttttctgagcagagggctccccacaaaagcagacactgaacggggttgctgtatcagctgccaagggaaaaaaaaaaagaggaggaggaggtttccctgatgctgggaggagggaaaggaggaccgatcgttctcagctgctgatcatctttagctaagtgctacacggggacccagcctggggagatcaatccaggcaaggcagaagctgagaacaagccaggccactgctcctcagggggaaaaataattcacgatttcttgctctcttctctatgccccttaacaccgcactgggacctcccagcacagggcaaaactgttgtctcaaaaaggagactttttccccccgttcgggcttcccttaaagagcagaggaacggtggtaagaagagtattctctctcttccactggttcctgtcgggggtccggggagggggcgtgtagaataggcatcaggcagcagggatatggaatcgtgttataatttaaccatctccactccgccacattgcaacctaaattatttatgctcttagaaaaatgataattagaggacagctgctagcctcctctctgagtctgtcgtgttcattctggaaacagcttcccagtaccctgatctcctcccttaggcagaggggttgtattattaaagaagaaaggcaggaaaaggaaagttgagtcctttcatgcaaaacaccaatccattacaacttggtaagtttgtttgcaatctgtgtagacttatgctctcaaaactagggtaatcccatgtctcttttcaaaggggcctcctgttaaagataggggttttgtttttcctataagaagcatcaagaggccggtgcggtggctcatgcccgtaatcccaacactttgggaggccaaggcgggtggatcacctgaggtcaggagtttgagaccagcttggccaacatggcaaaaccctgtctctactaaaaatacaaaaattagccaggtgcctgtaatcccagctactcaggaggctgaggcaggagaatcgcttgaacctgggaggcggaggctgcagttagctgagattgtgccattgcactccaacctgggcaacaagagagaaactctgtctcatttaaaaaaaaaaaaaaaaaaagaagaagcagcagcagcatcaagggcacagagaatctccgtatttttcccaaggctgagccaaaatggggagaatctacctcattaagaacaaagcagcatttagacaggtggggaaaatcgaacctgactgggtgtcaggggattttaaagaattcatgtgagttttgtaaggactgttggtggtatttggttatggtgttctttaaaagtgtttgtctgttagagatgcatatggaagtatttatggataaggtgatatgatacctggatttgcttttttaaaaactccaggaaacagcaccacataaataaaatatggcatagctatgcaatggaatattattcagccatgaaacggaatgaagcactgatccgtgctgcaacgtggatgaaccccaaaaacatgatgttgagtgaaagaaggcagacacaaaagaccacatggtgtaggattccatttatgcaaattgtccagagtaggcagatccatagagatggaaatcaggtgagtgattggcaggggcaggtggagagggaatgtggagtgattgctgtcagggatggggtttcctttcggggtcatgaaaatgttctggaactagataaaggtgatggttttcacaacatcgtgaatgtgctatggaattgcattttattttattatttatttatttacttatttatttatttttgagacagagtcttgctctgtcgcccaggctggagtgcagtggggcaatcttagctcaatgcaacctccgcctcctgggttcaagcaattctcctgcctcagcctcccgagtagctgggattacaggcgccctcccccatgcccggctaatttttgtatttttagtagagacgaggtttcaccatgttggccaggctggtctcaagctcctgacctcaagtaattgcctgcctcggcctcccaaaatactgggattacaagagtgagccaccgcacctggccagaatagcattttaaaatagttaagtttatgttatgtgaatttcacctctacttaaaaaaaaaatcccaccagaaaagaagggaaaagatacacccgaagagcagaaaactgctaattggccacgcacgagggtggctcatgcctgtaatcccagcactttgggaggctgaggcaagagaatcgcttgagcccaggagttagagactagccttggcaacatggcaaaaacctgtctctacaaaaaaatacaaaaatgcgtgcctgagttcccagctacctgagaggttgaggtgggagaatcacctgagcctgggaagttgaggctgcggtgagctatgatcatgccattgcactccagcctgggcgacagagcaagaccttgtggaagggaagggaaaggaaggggaaagggaagggggaagggaaaggggaaggggaagggaagggggaaagaatgggaagggaagggaggggagaggaggggagggaaggggggaggggaggggagggaagggaagggaacaagaaaataatatttgcttctaaaactgttatggtttggctgtttgtccccggtaaaattcatgttgaaattgaatccccaatatggcagtactgggaggtgggaagcggggagggaggggaggggaggggaagggagggaattgctaattggagaagctgggtgatagggccttggggatttgctgtatttttttcattgtattctctctacttctctactttgtgtatatttgaaattttgtttctgtttttgagacaagatctcattctgatgcccaggatggagtgcagtggtacaatcatggctcactgcagcccaaacctcctgggctcaagcaatcctcccgcctcagccttctgagtggctggtactataggctcacgacaccatgtccagctaatttttttgattttttgtagagatggggtctcgctatattgcccaggctagtaattttctatatttgttttgtttccttttcttttcttttttgtttttattttattttattttattgaaattttctattttaaagagacgtctgggaagtgtggattaagaagaatgcagcccatgtcagtgggtttagaccaacagacaattttggctggacacagtggctcacggctgtaatcccagcactttgagaggccgaggtgggtggatcacctgaggtcaggagtttgagaccagcctgaccaacatggtgaaacccggtctctactaaatacaaaaaactagccgggcatggtggtgcatgcctgtaatcccagctacttgggaagctgaagcaagagaatcacttgaacccaggaagcagaggttgcagtgagccaagattgcaccactgcgctccagcctgggcaagaagagcgaaactccatctcaaaaaaaaaaaaaaaaaaaaaaaaaccagattgggggatttctatgtgggtgagtccagcccgtagttcagcagctggggagccactaggatgggaagcaactcaaagcaaagctggtgggattttccccaggccaggaggcctccaggtccgtcacctacactggagtgtagagaagaagccagccctggggtccctcggcctggagaacaaaaggactcaatccaccctgccagcctgggaccctgcccaagcttcatctccacatcagtaaaaccaggctaatccttcatacctggtggggattttgtgagcattaaatgagatcgtgttaaaaaggaacaacaagaaaataatatttgcttctaaaactgttatggtttggctgtttgtccctgctaaaattcatgttgaaattgaatccccagtatggcagtactgggaggtgggacctttacaaggtgactgggtcatgacagccctcatgaatggactgattcatttatggattaatgaattaatgggctaatggattaaggggttgttatggaagtgggactggtggccttatgaaaagagaaagatgagccgggggcagtgactcatgcttgtaatcccagcacttttgaaagccaaggcaggaggattgcttgaggacagaagtttgagaccagcctgggcaacatagtgagacccctgtctctatttttaaaaggagaggagaggggaggggagaagaggggaggggagaggaggagagggaaggggaaaaggaagagagacctgaagcttgagaccagcctgggcaacatagtgagacccctgtgtctattttaaaaagaaagagaggaaaggagaggagaggagaggagaagaggaagagaaacctgagcttgcacactcagctcctcaccatgccatcccctgcaccgacttgggactctgcagaatccccaccaacaaggagctcctcctcagatttggcctcttgaccttgaacttctcagcctccgtaactggaagaaattaactccttttctttataaattacccagtttcaggtatactttttttttaaatgagacagagtcttgctctgtcacccaagctggagtgcagtggcgcgatcatggctcactgcagcctcaacatctctggctcaagtgatcctcccacttcagcctcccgagtagccgggactacaggcgtgcgccactctgcccagctgattttttaaatgttttatagagatagggttttgccgtgttgcccaggctggtctcaaactcctaggctcaagcagtcctcccaccttggcctcccaaagtgctgggattacaggagtcaaccaccatgcccagcccagtttcaggtattctgttataagcaacagaaagagggctaagacaaaaaccatctctgaaagacacatgaaaatcaatcataggggtccgcttttctctgcttatttttttatatttagggaattttaaaccatgtgagtacgatatggattatatgagttaatgcatatgttaaatagcttgatttagccattgtataatgtatgtatatatatcaaaacatccataagtatatatacaatttttacttgttgatttaaaaatttatttaattaaaacgtgagatcatgcatgtcaagagacatcatactttttttcttttttttttttttggtaaaaggccagataataaaaatcctaggcttggccaggtccgttggctcatgcgtgtaatcccagcactttcggaggccaaggcaggtggattccctgaggtcaggagtttgagaccagcctggccaacatggtgaaaccctgtctttactaaaactacaaaaaattagccaggcatggtggtgcgcgcctggaatcccagctattctggaggctgagacaggagaatcggttgaacctgggaggcggaggttgcagtgagccgagatcacgctgctatactccagcctgggtgacagggtgagactctgtctcaaaaaaaaaaaaaaaaaaaaaaggagaaatttgttcctagtataacataagacgtggttattaaagtgcctcgtgaactcaaaaatgctatgtcacataagctgtcattattatgcagggagtcataagtctatgcaattagcattgaattttcctgtttttaaatcacatgacttgtatgagtcacttcgtgatcaacataaatagtcatcctggtttccttagaagtcctttgaaaatgtcaaaaagttctacttttcctcttacgcaaatgagaccatcctgagtcaaccatcttttaaactcttgtgttttttgccagagttggtgaccatgaatagattgaatgattggccctgatgagtcactctctcctgtgtgcctatctttgcgatggtctcatcatgggtggtgggtacttctccatggcttggccttaggcttggccacgtgacttgcttcagtcaatggtaggtgggcagaaatggcaaggagtgagttccaaaccaggattcagaagccacatgtgtttctgcctgccctcttgcacctctgctcccaccacggaaacaactgtcccaggaggaagaggagggacacgtggagcagaggagtcacccagctgagccccagccagatcagccaaacccagctggtacacatgtgcatggggaataaatgactattgctttaagccactaagttttggggtcatgtatgatgcagctgtgatggttaatttggggtcagcttgactgggttaagagatacccagatagctagttacaccttatttctggatgtgtctgtgtttttagaagagattcgtgtttgaatctgtagactgagtaaagaagattcagcctcctcgatgcagtgagtatcttccaatccactgagggcaaggatagaacaaaaaagcagaagaaggggagatatctccatttcgtgcctcagcctcctgagtagctggaattacaggctagggccaccatgcccggctcgttattttttgtatttttagtagaggcggggttttaccatgttcgttcatgcctataatcccagcacttgggaggtcaggagctagagaccagcctggccaacacggtgaaaccccatctctaataaaagcacaaaaaattagccaagtgcggtggcacacgcctgtaatccagctacttgggaggctgaggctggagaattgcttgaacccgggaggcagaggttgcagtgagctgagattgccccactgcactccagcctaggtgacagagggagaccctgtctaaaaaaaaaaaaaaaaaaaaaaaaaaaaaaaggaacttctgtccagtagccaaagtctgggcaccttctctatgattccaattggtttttcaactctgccttcaaaaaaaaaaaaaaaaaaaaaaaaaaaaaaaaaggccaggcacagtggctcatgcctgtaatcccagcactttgggaggccaaggtgggtggatcacgaggtcaggagatggagaccatcctgggtaacatggtgaaaccccgtctctactaaaaatacaaaaaattagccgggtgtggtggcacacacctgtaatccagctactcggaaggccgaggtaggagaatcacttgaacccaggaggcagaggttttagtgagccgagtttgcgccactgcactccaggtgggctacagagcgagactctgtctcaaaaaaaaaaaaaaaaaaaaaaaaaagccaggcgcggtggcttacgcctgtaatcccagcactttgggaggctgaggcgggcggatcacgagatcgggagattgagaccatcctggctaacacagtgaaaccccgtctctactaaaaactacaaaaaattagccgggtgtggtggtgggcacctgtagtcccagctacttgggaggctgaggcaggagaatggtgtgagcccggaaggcggagcttgcagtgagccaagatcatgccactgcactctagcctgggcaacagagcaagactccatctcaaaaaaaagaaagaaaagaaaagaaagaaaagatgctggaagcaaaaccatttagaaagcaatgtcatgtgttgatccagttagaaaactgggagggccttggtcagccagtccaggaacgaggcagagaatactacctcacttacctccaagggcccatgcaaaaaacagagggcacattcaaactgggtaatctgagaagcatttaataaaatatatttacagcaaaggctggatcggttggataatgcaacagcaactacaggaagctgttaccacccacacctgaaggggtgaagaagagaaggttctaggctccacagacacagggagaattgtgcagaaaaggcagcctgaaagagggacgcacacaacccatagcaacctgaaacagaggaagccaaggaaataaatttaaattcccttaactggccgggcgcggtggctcatgcctataatcccaacactttgggagatcgaggtgtgtggatctctttaggtcaggagcttgagaccagcctggccaccatggtgaaactctgtctctacaaaaaatacaaaaattatccgggtgtggtgtcaggtgcctgtaatcccagctactcgggaagctgaggcagggagaatcacttgaacccaggaggtggaggttgcggtgagctgagatcacgccactgcactccagtctggttgacaaagtgagacgactacgtctcaaataaataaataaataaataaataataaataaataagataaattccctcaacctcacccttctcccacttttttttttttttctgctctgtcacccaggctggagtgcagtgacaggatcatagctcactgcagcctcgacctcctgggctcaagtaatcctcctgcctcagcctcccaagtaactggcactacaagtatgtgccaccatactcagctaattcttccttccttcctccctccctcccttccctctctctctccttccttcctttttttttttttctctttcttttctttttctttctttggagagatggagtctccctatgctgcccaggctggtcacaaattcccggcctcaagcaatgctccccgctcagcctcccaaagtgctgggattacaggcatgagccatcgcaccttctctcacttttcatctgtgagtaactcccattggctgagccaaccaaaagccagtgggcaacagagcccaatgatgttgtcttttggggtcagcctcaggaacagaagagggtagaaggtgaggaagagtagagctggaaggaaaaatggactttacccactttctcttaaccagttctcagctgacaaagcatcttcagcactttctgcatccctgcaattcaggtcatctttctcagcagcctgcttggctgatctgattcctttttccttctctggctaccaaaggaaacagatacaaaagggaaaattgattttccagggaagcctccagtaagcctcaaggacaatcccatttatgcatttatgttcctcgtgacatctggttttgagccagtcccgctgtgggtggagtgctgttactatactgtttatgttctgatcgtatttctcttggcccagagagcaggcagctggccaaacatataatgccctccatgggggcagaggtctctctctgagcccaacagctgagccccgcacacagagcgctactgggaaatttgacaccatctaccatcagcagaatgaatgcctttgccattggcccaggcaagaaaatcgttgcttgcatatcctgggcaaagtctagttatgcattaacagtgacagaaggacaattaggatgcaggaaaccaagaaataatatgtgagataaagtgtacactctccttgcctgtgtgagccaattgtttaaactgcaagaagacacacaggctctgaaatcgaatccttctgtgctcagaccccaactttatcacttcctggtgccatggtctctcttcctttccttccttccttccttctttccttccttccttcctctctgtctctctctctcttttccttccttccttcctctgtctctctcttttccttccttcttttcttccttcctctgtctctcttttccttctttctttccttctttccttccttccttcctctctttctctcttttccttccttccttcctctgtctctctctcttttccttcctccattccttctttccttccttccttcctctctctttttccttccttcttctgtctcttttccttccttctttccttccttcctctctctcttttccttccttccttcctctgtctctctctcttctccttccttccttcttctgtctctctcttttccttccttccttccttcgcgcgcgcgcgtgtgtgtgtgtgtgtgtgtccactgcctatgttcaaaattctcctccttctatgaggataccagtcatattggattagggattgccagggtttgaatgcatgtgtgcacccaaattgaaatgttggaccctaagacccatgcaatagtgttaagcagtggggcctttagaggtgattaagtccggaggactctgcccctctgaatgggattagtaccttaaaaaagggcctgagggaactagctagggcctttggcccatctgttctttttttttttttttttttttttttttttttttttttttgagacggagtctccctctgttgccaggctagagtgctgtggcgtgatcttggctcacggcaacctccaactctctggttcaagggattctcctgtctccacctcccgagtagctgggattacaggcatgcgccaccatgcttggctaatttttgtatttttagtagagatggggtgtcactatgttggtcaggatcgtctcgatatcctgacctcgtgatccgcccgcctcggcctcccaaagtgctgggattacaggcgtgagccaccatgcccggctgcccatctgttctttaaaaaaaaaaaacaaaacaaaactttttttgagacagggtattgctatgttgtccgggctggtcttgaactcctgggctcaagtgatcctcctgcctctgcctcccaaagtgctggcattaaaggcacgagccaccatgcctggctgcccttttgttcttctgccacgtaaaaacacaacaacaagataccatctcgaaggcggaggacaagccctcaccagacactgaatctgctggtgccttgatcttggacttcccagcctctaggaccataagcaataaatatctgttgtttacaaattacccattctctggtattttgttatagcagcaggaacgaactaagactaggcccaccccagtgacctcatcttaatgaattatgtctctaatgacccaagttccaaataaagtcacattctagggtactagaagttaggacttcaacttatgaacttttttttaagacacgaggcctggctctgtcacccaggctggagtgcagtggcgcagtcatagctcactgcagcctcaaactcctgaactcaagcagtcctcccacctcagcctcccgagtagctgggattacaggtgtgtgctaccatgcccagctcaacttatgagctttcaaagacataattcaacccataatggtaacttaatctgagtctcagtctccctgtaaaacaggctaagaaccttgaatggacaaataatcttgatgaaatgattatgaaaaagggaggcatttaaaacagtttctggcacagagtgggtcctgaaaaaaccgtccggctaggaaaagatgtgctaaagacttccagggggagtccaggggtgtaggaaacacggagaaaagcctgcagataaatcagtgagtgacactaggtatcatgtaacactgtcgtcaattttgctaagatataaattacaagccaggcacagtaactcatgccagtaatcccagcactttgggaggccaaggcaggcgaatcacctgaggtcaggagttcaagaccagcctggccaacacggcaaaaccccatttctaccaaaaatacaaaaattagccaggagtagtggtgctatcctgtaatcccagctactcaggaggctgaggcaggagaatcacttgaacccaggaggcagaggttgcagtgagctgagatcacatgaccgcactccagcctgggcaacacagcaagactccatctcaaaaaaaaaaaaaaagatataaattagtacaataaaatgtacctgagctggctgcagtggcttacatctgtaatcccaaggactcaggaggctgaggcaggaggactgcttaagcccagaagttgaagactgcaggaagctgcaatcctgccactgcactccagcctgggtgacagagtaagaccctgtctcttaaaaaatgtttgagcacggtggctcatgcctgtaatcccagaactttgggaagctgaggcaggtggattacttgaagtcaggagatcgagaccagcctggccaacatggtgaaaccctgtctctactaaaaatacaaaaattagccggccatggtggtgtgcacctgtaatcccagctatttgggaggctgaggcacgagaatcacttgaacccgggaggcggagagtgcagtgagctgagattgtgccactgcactccagcctgggtgatagagggaggctctgtctcaaaaaaaaaaaagtgcacccatcttcagtgtacagtttgcaggttttgactaatgtgtacaacacataaccgccaaagatttagaacatttccatcactcccaaaatgcccccatgcccctttgtggccaatgcctccattcccgtcccccaggcgaccactgatctgtctgtcactttagattcaacttgcctattctataattgtatagaaacagaatcacaccaggggcagtggtccatgcctgtaatctcagcactttgggaggcccaggcagtaggattgcttgagctcaggggttcaagtccagcctgaacaacatagtgagacattgtctctaccaaaaatccaaaaaaattagctgcgggtggtggtatgcacctgtagtcccagctactcgagatgctgaggagagaggataacttgagcacaggagattaaggctgcagtgagttatgatcgcaccactgcactctagcctgggtgacagagaaagaccctctctccaaagaaaaagaaaagaaatgggccgagcatggtggctcacacctgtcatcccagcactttgggaggccaaggcgggtggatcacaagttcaggagttcaagaccagcctggccaacatggggaaaccccgtctctactaaaaatacaaaaattagccaggcatggtggcgggcgcctgtagtcccagcttctcgggagactgaggcaggagaatcacttgaacctgggaggcggaggttgcagtgagccaagatcatgccgctgcactctagcctgggtgacagagcgagaccttgtctcaaaaaaaaaaaaaaaagaaagaaaataaaaaaaaaaaaaaagaaaaagaaatggaatcatacaatcatacagtctgtcctcttttgtgattggctcctttcactccacacttgtgagatgcatccttctgatcttttcatcagaatctgttcctttctattatactccagtgtatgggtggaccactgtttgtcctctctcttgtgaatgggcatatggtttgtttctagtatttggctaacatgaataaagctgctatgaacatccatgtataaaagtctttgtcggggccaggctcagtggctcacgcctataatcccagcactttgggaggccaaggtgggaagatcacctgaggtcaggagttcaagaccagccaggccaacatggtgaaaccccgtctctacaaaaaatacaaaaatgagccaggcatggtgatgcatgcctgtaatctcagctactcaggaggctgaggtgggagaatcagttgaacctgggaggtggaggttgcagtgtgctgaaattgcaccactgcactccagcctgggcaacagagcgaggctctgtctcaaaaaacaaacaaacaaaaatgtctttgtggggatcctgggtaaataccagagagcggaattgttgagtcacctggtgagtgtccatttaaccccataagaagctaccagactgtcatccaccaacagtgtgtgcatcactctacatcctggccagcacttggtatcacccgtctttttgattataactattctagtggatgtgtggtgacatctgcctggggttttaatttgcatttccctaatgtctaatgatgtcgtatgcatgctcatgcatgagtaagctttaaagacacgaagggaaagcccgggggtcagagaagacattgctgagagtcaggaggtgggaatgcaagatggcactgcagaggtttttagggtgtgggagtgagggggtggatggaagggcatactgggcataccacagggtgggagatgaggccttaggtctttgcaagatggtgagtaggaattgaggctccctgtataaagtagggatcctggtaggaccacacctagggacagggtaccaggaagactctccaccagcccaaggtgagcacaggggagctcatcttttttgctttttttttttttttttttttgagacagggtcttgctctgtcaccaggctggagtgcagtggtgcaatctgggctcactgcaacctctgactcccgggttcaagtgattctcctgcctcagcctcccgagtaactgggactacaggcatgtgccaccacgcctggctcatttttttgtattttagtagagatggggtttcaccatgttggccaggatggtctcaaactccagacttcgtaatccacctgcctcagtctcccaaagtgctgggattacaggcgtgcaccactgcgcccggccatctcttttctgaacattgaaaacacatacatataggtaataaccagtgtgctctaggatgtgggaaacagacattaatttacactgttgggccgggtgcagtggctcatgcctataatcccaacactttgagaggccaaggcaggcagatcacttgagcccagcagttcaagaccagcctgggcaacatggcaaaaccccatttcggcctggtgtggtggctcactcctgtaatcccagcattttgggaggtcgaggcaggtggatcacttgaggtcaggagtccgagaccagcctgagcaacatggtgaaaccctgcctctgctaaaaatacaaaaattagccgggaagctaaggcaggagaatcgcttgaacctgagaggcagatgttgcagtgagccaagatcgtgccactgcactccagcctgagcgacagagtgagactctgtctcaaaaaaaaaaaaaaaaaaaaaatctctgccaaaaatacaaaaattagccaagtgtggtgggacgtgcctgtagtcacagctacttgagaggctgagttaggtgggaggatcatttgagcctggaaggttgaggctgcagtgacctatgattgcaccactgcactccagcctgggtgatggagcaagaccctgcctaaaaaaaaccccaaaatttactctgtttactctcagctcactgcagctcagacctctccaggcttaggtgatcctctcacctcagcttcctgagtagctgagaccacaggcgcgcaccaccacacccgactaatttttgtatttttttgtagagacatggatcctgctatgttgcccaggctgttctcaaattcctgggctaaagtgatctacccgactcagtctcccaaagtgctggcattacaggcatgagccaccatgcctggcctcttgcttacgtctactttggacttgctctcagattcttttgtgtggcgaagtgtaaaacctggactggctcagcagcaacaattggattttagacgagtagacactccaaaagatgttcactacaataaccattatctcagcacttcatttctaaccttaactctaacctagagagacaattgcacaaatgttcagaacagcctgtatcagttacctaatgccatggtaatgctgcgtaacaaatggatgtgaaaacgtcagtgacatgcaacattaagtttattgctcatatatctggggcaccctcactaatggggtggaaaggaggtgatcaaaacatccagccagaacatctgcttctcttcctcctccttccctttcccttcttcctttatcaactctagcatttactgaacaattcttatgttctggacactgctcaaaaagcttcacaggtaataagtaagttcattttcaccaggagataagtgtcactaacatatccactttgcaaatgagaaaactgagtcagaaagaagttaaataactggcctgaaagcccatagctagtgaggggtagactcaaagagtccttgcttctaaaccctaagtccagagggcaacaacctttttatataaaggaccagaaaataaatattttaggcttcatgggccatgtggatttggcccatgggccatagtttgctgacccttgccttaatccaacagcctaagaaccttcaaagtaaagctgaccagagctttacctttccacgagatttccaacaaacccctaaatccagtaaattagaagaagggtgtaattcaccatgaatgaattaggctgattgctgcataattcatgattatcaaaatgatgttttaatgtcagtcatcttcttaagatattttttaagacttctaggcactgtcctattgcaggagaaaaatgtttttatacctttttttttttttttttgagacagtgtctccctctgtcacccaggctggagtgcagtggcacaatcacagttcactgcagcctcaacctcccaagctcatgcaatcctccctcctcagcctccctagtagctgggactacaggagtgtgccactgtgcctggctaattttttatttattttttgtagagatggggtctcactactttgctcaggcaggtcttgtacgcctgggctaaagtgatacccctgccttggcctcccaaagtgctgggattagaggcatgagccaccacacctggccacaggaaaaaattctgcttcagtggaaaattagacactgtctagagcagggattggcaaaccacagcccagaaaccaaatccaaccactcctatttgtttatattttttacagctgttttcatgcttcaatggaagtggagtagttgccatgtagaccatatgtctagcaaagcctaagatatttactacctggccctttacagaaaaagcctggcaacccatagggtaaagaacactcttctgagttatctgattctagcctttcctttcctttgacctattttactattctgcaagttcttgataattgatagcaatgcaaaataatcctttttttgtagacaagaaaaagctgtaatgtccaccagaagttcaacctacttccctccaccactacggaagagttcaatttgcacagtcatttcagtgtttctgatccataactgtgtcttttatttgaatgcgcctttgaatgagttgtaacattggttccgtcattcatgaggaagataaaatctttaacacacattcacttcacatatgtatgaaagtcatgatttttcttctttctttaattattcttgaacattatttatggtttcataagagtttagagagctgctctccaatggacattaaaaaatatctgcatcattctactagatcttgtaatagtagccctgagctataaattttgtaccagaaacttgagaaaaagtttgcctgacttaatggcattttgggaggctgaaaaatcaacttttgagtattaaactggaaatccaaaaccagatgtggtgactcacacctgtaatcccagtgttttgggaggccaaggcaggaggatctcttgaggccaggaattcaagaccagcctgagcaacatagcaagaccccatctctacaaaaacaaattaaaaattagtcagtcatggtggtgtacgcctgtagtcctagctacttgggaggatctcttgagcccagtaattcgaggctgcagtgagtgatgagcgtgcctcttcactctagcctgggtgacagggtcactccctctctctaaaaaataaaataaactggaaatccaagtaactagataatgaggagataaaacataaaacactcttagaagttatgagtatgtgatatggcttgaatgtgtccccacattttatgtatttgaaacttactccccaaatttatatgttaattcaaaacagggctttgggaaggtatttaggatcagataaggtcatcagggttaaacgttcatgatgggactggtggctttataaaaaaaggaagagagacctgagtttacatgcacgctcttgccccctcactacaggatgccctctgccatgttatgacacagcaagaaggccctcaccagatgtcagttcttcagtcttggccttcccagcctccagaactgtaagaaaaacatttttttcttttttttctttcttttttttttctttttggcagcgtcttgctctgttgcccaggctggagtgcaacagcacgatctcaactcactgcagcttccacttcctgagtttaagtgatgctcacatctcagcctcccaagtagctggacttaacaagcatgtgccaacatgtccagctattttttttttttttgtatttttagtagagacaggtttttgccgtgttggccaggctggtctcaaactcctggcctcaagcgattcacctgcctcagcctcccaaagtgctgggattacaggcatgagccactacgcccgacatttattttctttataaactacccagtttgtgatattttcttatagtaatgcaaagtagactaagtatataagtgatcgttgatgccaaaaggatggttgagatcccccagggagtgtggggggaaatatgagaagaggaaaaggcagacaaatggggagggacagggtagaggagcagctgaggacagctaaagttagactggacagagcagcattgtgggctgcaacagcatgggccaaaggagcaccaaggcagatgcatcaacaccatcaagttgtgcataaaggtcaaggaagggctgaaaagtggccattggcttgagcaaataacaggtcattagtggccttggcaagaacaatttgataggaatggtggattgaaaggcaaacaacagtgggtttggagtgaatggagagaaggaagtggaattacagttggctgaataaatgaagaataatgcctgattgctgcagggttgttatgacaaccaaataagataatgatggtgaatactctttatggaattttttattgaggtatcatttatatacagtaaaatccaccctttattagtatacagttctataggtttggacaaacatacacagtcttgtagcctctacaaaaatcaagaaatagtacagttccctcacccatagacagttctcttttgatcctttgtaattaatcccttcctgaagccttagcccatagcaatcattgatctattttctgtccctacagccttgccttctctagaaagtcacataaatcaaagtgtacactacatagacacttgagtctggcttctttcactcagaataatgcacttgatattcacctatcggtattttatttttttaattgctgagtaatattccattgtatgtgaatattccatcacttttttttcataaaagtgaaatgctgtataaaattgtaaggacttattattcttggaaaatatatatacatgcaggcaggaaagtctgccttagtttgggctccctcagaagctgaccttgagacatgattcaagtgaaagttgtttattttagagtcagttccaggagactcagtatgggaagataaagtgacacagggaaggaaaacaacaagcatcaagcaagttaccactgtgggcaactgacgctcaatctactggtgacctctaggagacaacatagaatacagatctcagaattgcccagcagaggagtgagggagctgggatatttatcctccaccttcctaccagtcactgattgacagccactcatggaggacattaaatctctagcatttctggcccaactgtgtagatcataatgtgtaccccaaagaccagagacagtcctcaaacaaatgaatgcaggtgctggccactggaaattaggccagagtgtgctgaccaaggatgaggtaggggaaggccaggtgccgaccattcctcctatagagtggatacataatcagatcataaacgatctccccttaattttcatctctttcttaagctgtaaacatcaagtatttttatagctcttcaagatgcactgcatggagaccttctaaatcatctctatgtcctctaattgggcttgtcactcacagctaatattgctatatttatagttaatctctccatatagcgtcttatgacttatttttggatttgtgagtcaggcgtgcatactccaatatgcatgctcatgctgctgtttatctatctctacgggaaaacaggatgttgtgttccttttttccctgcctcaccgtacccactcctgacccttgtctgacagcctttggcttatattaattttcataaataccttctgcttacttcatagttttccaaatattcgaaaatactttatttcacttaatctgcaggataacactaggaggcaagcagagacctcttgcctctaatgcattttacacatgagaaaactgaggctcatgtcaattaaaaattaatttaagctatttcatttaagttaaaaattagtttccactgcatcatatgggatgcttctagttgtgaataactaaaatcccaaactgaattaaacattaaagaaaattatcagctcacatgaagaatataataaataaaaagtaggatgtgctttcaaaagaggtttgatgtgttggctcacaagatgactgccaggaggaccttctgcaacttcacgccccttgttcacaaccggagatggatatacactacctccatcctgagattcactctgattggcccagtccatatcacatgaccacctctgagccaatgaaggtagatggggtatgctgattggcctaaactggtcacatggtctacccggaagctaaggcaaaactcacttccctagaaatagatggagtcccaagtgaaaaacagcaagaaagggaaaatattggaagacattcatggaaagtgggttaattaggaatgttgtcatctgtaggttaccaataacctgagtaagagtggcttaaataaataggacttcagttttctcacaaagcgaaaagtatggaggtagatgatagccattttttaaaaagccattctcaggcacgggcagtggcttgtctgtaatcccagcactttgggaggccaaggcgggtggatcacttgagatcaggagttcgaggccagcctggccaacatggtgaaaccctgtctccaccaaaaatacacaaattagccaggcatggtggcgggtgcctgtaatcccagctactcaggaggctgaggcaggagaatcacttgaacccgggaggcagaggttgcagtgagccaagatcatgccactgcactccagcctgggcgacagagccagactgtctcaaaaaaataaataaatgaattaaaaagccattcttctctccttctttcacccaccatcctcactatattgcttttcctccttaaatttaatcacttcatagtctcaaaggtggctgctacagctggaaaggaggagtaagttctagtgttctataccactgtaggatgactatagctaacaattatgtatagtttccaatagctagaaggaggatagtgaccgtcccaacacaaagaaatgataaatatttgaaatgattaatatactgattatccctgatctaatcactatacatcgtatgtatcatgtacaattatttgtcaattaaaaataaaattttaaaaaaaaatttattttatgtttatttttattttttgagacacagtctcactctgtcacccaggctggagtgcagtggtgcgatctcggctcactgcaacctccgcctcccgggttcacgtgatcctcctgcctcagactcctgagtagatgggattacaggtgcacaccaccacacccagctaattttttgtatttttagtagagacagggtttcaccatgttggccagactggtctcgagctcctgacctcaggtgatctgcccgcctcggcctcccaaagtgctgggattacaggcgggctgcctggccaattttgtattatttatttactttttttttttttttttgtatgagacagggtctcactccgtcacctaggctggagtgaagtggcatgatctcagctcactgcagcctcgacctcctcagctcaggtgattctctcacctcaggctcctgagtagctgactaaaagtgcccaccaccaggtctggctaatttttgtaattttttgtagagatgggggtttcgccatgttgaccaagctggtaccgaactcctgggctcaagcaatccgcctgccttggcatcccaaagtgctgggattacgggcctgtgccactgcatcggcctgctcttgccttttaacaaggaataaatctgcatcttcaagagccctccagcagacttctttatcatgggtcaagttctcccaatgtagagtctagtctaaaataagcatcctgatgcaaagggtttattgagaaggtttgttccagaagaaaccatgaagggaataaaggaagcagaacaaggaaagggaagaagacaagacacggagaggaagttccagcctaacccctcccccatagagagctccacagcttaaattccatcttggagactgtcccatggtgtctctcaatcagagaagcagaaccactgtgagtgatctagaacggggaatttattatgggatttgaccttgtgcaatagtgagttagtggagcagactgtggcccttggtctggtactgggtctgcaatcactctaggtcagccagcccatccgtcaggagggaacactagctgtgcacaagagcagggaggagcagaacccacgagggacttgcgtctgtctcgcaccacctgcaacctcaatgtcgtgagtgacctgcaggtgaagctgtcatccttcaccttggagctgcgtgttcacttggcctagttctcagggaagatgaaagagatctggcaagagctggagaagagccaacagctctgcagcaatgtgtgtgtgtgctgccgccatgcctgacacctccaggaagattaaaaactagggtcattgctttacatccatcttccaaatcttgtgcaggttattcttctagccaactctaacccagaactttacagggaagagagaagggagaaatgttcttccagcttagctgaattgacgttatccaaagccaaatgtcccacctggagaaaaaaggagttagctcctggctataggtgcccccagagaagacgcaaatacacaggcattccccagtctctgtgcaggcaaggaggtccccgtgtccaaaggcaaccctgtgatggccacagaggctggacgtcagcagcaaaacacgcagaactggtaaagggatcagaggggatctgggcagggcatgacaatggccgctacatttactctacatctcaatggccagagtcaatgtcacatccctgccctgactcatacaggtcaaggttccagtctaccccagagggtaaccaacccacatccaccacatccaccattagcatgagagccaaggcaaagacaacgtcatgtaatccccttccagtgtcctttccactgttttcagtattgactgttttcagaacataattaatcaagattagatgtctagaaaaccttgtttaaaatgtgttggccgggcacagtggctcatgcctgtaatcccagcactttgggaggccgagacgggcagatcacctgaggttgggagttcgagaccagcctggccaacgtggtgaaaccccgtctctactaaaaacacaaaaattagccaggtgtggtgttgctcacctgtaatctcagctactcaggaggctgaggtgggagaattgcttgaacctgggaggcggaggttgcagtgagccaagatggcaccattgcactccagcttgggcaacaagagtgaaattccgtctcaaaaaaaaaaaatgtccagtaaaccttgtttaaaatgtgttggccgagcacagtggcttatgcctgtaatcccaacactttgagaggccaaggggggcagatcacctgaggtcaggagtttgagaccagcctggccaacatggcaaaaccgtgtctccactaaaaatacaaaagttagccaggtatggtgttgtctgcctgtaatcccagctactcggaaggctaaggtgggaggatcttttgaacacaggaggcagagtttgcagtgagctgagatcatgccactgcactgcagcctgggcaacagagtgagactccatctcaaaaagaaaaaaaaaaaaaaaaaggcgtggtttcctcccatcttcccaaatgaatatctgaagtatttatctctaaatcaactgttcttcaaagtgtattctgtgaacccttaaacctaagacccttttgagaatccatgagatccagtggtgtactgagacctatttctatcagctagaagaaaccaattgttaaaatgttcaggcactggtgcgagccagttgatagcttgaaattggccatggaagaagtatttacaccatggaaattggcatgcagagcttttttccctcccctttccatgagaaaatagttaaacatttaccagcacacctccgtttgtagtaatattaagacctgattttcctttttctctgtgttgtcatttgcactgttggtaccaaaggaatggtggggaaaactgctggtgccttagcaggaatcaatgcagtattacaatattgtactagtaattgtttttttcataccatgcactcacagtgaggaaggaagggaagaaggaatgaaggaaggagggaaggaaggaaggaagggagggagggagggagggagggaaggagggaaggaaggaagggagggagggagggaggggggagggaaggagggaaggaagggagggagggaaggagggggagagagggaaggagggggaggggggaaggaaggagggagggacaacttcacttaaagttgcagtggtccacacctgtagtctcagctactcgaggtgagaggatcccttgaacccaggggttcaaggctgcagcacaccatgattgtgcttgtgaagagccactgcactccagcatgggcaacatggccagaccccctcttaaaaagttttcaattaggctgggtgcggtggctcatgcctgtaatcccagcacttcaggaggccaaggcgggaggatcacttgaggtcaggagttcgagaccagcctgaccaacatggtgaaaccccatctctactaaaaatacaaaaattagctgggcatggtggcaggcgcctgtaatcccagctactcaggaggctgagacaggagaatcgcttgaacctgggaggcagaagttgcagtgagctgagatcgtgccactgcactccagcctggatgacagagcaagactccatctcaaacaaacaaacaaagtacaaggtaaaccaatggattttaatgaaacagaactgattaaaatggattcagatttctcggagcaactgatctttaagaaacttccagtttttgagttttggtgtagtatcaaagagtaattcctgaattttctgaaatattgaaataatttcctcccttcatcaactacatgtatgtagattttcttgagtcttcaaccaaaacaatgtatcacaacagagtgtgtgtagcagctgtgagaataaagcagtcttctattaaaccagacagtaaagaaatttgtaaatatgtaaagcaacgccactcttctcactaaatttttttttaaatataataaaatatattcattgtgttaggctgggcgcggtggctcacgcctgtaatcccactactttgggaggctaaggcaggtggatcacctgagatcaggagttcgagaccagcctggccaacatggtgaaaccccgtctctactaaaatacaaaaaattagccaagcatggtggcacacacctgtggtcccagctactcgggaggaaattcaaggctggagtgcagtggcacgatttcagctcactgcaacctccatcttcccggctcaagcaattctcctgcctcagcctcccgagtagctggaattacaggtgtgtgccaccatgcccagctgatttttgtagttttagtagagacctggttttaccatgttggccaggctggtctcaaactcctgacctcagatgatccgcctgcctcggcctcccaaagtgccgggattagcttggctttttctcttcaaagacctaacaagaacaaagccatattttgacttgtctgtgtatgctacctaggatcattcatacctcaaatccccctcaaacacaatacaaattaatgagttggggctgggcatggtggctcacacctgtaatcctagcactttgggaggccaaggtgggcggatcacttgagatcagaagttcgaaaccagcctggccaatatggtgaaaccctgtctctaccaaaaatatgttttaaaaaattagctgggcatagtagcatgagcctgtaatcccagctactctgaggctgaggcaggataatcgcttgaacccaggaggcagaggttgcagtgagccaagattgcgccactgcactccagcctaggcagcaagagcaaaactccgtctcaaaaaataataatgataataatgagctgaatataaaccacagagtggctttgtcagcaaggcaagttgttaagaactattcagctgttacttgcataattgattattaaaagcaactgaacctatgagaggtgctatcttagccagaacagctggcttggtctctactctttcaaaaatacttaccactggggaagctggaccctgtcatctcactgtaggatgtactgcttgaaattcttgctgggtcaaaataatagctttgctgtgtaaactggacccatgcaagtttcctgttggctaacaccataagccatgaccttcagccaacggttgctaatgtcgggaagttaaaacacagtccaatgagttcaagagatctttgtgtagacccaaaatttcattcatataaactcatgagctcttcttctaggaggaacagaaaggatactaaatgaatttagcctccaaagatctggtttccagttccaagtatcatcaactagcagcaggacagaatcatgtaatttcatcaaaaaaaggggtccctatggttccctgaaactgtagaattcattgaatgtacgattctaggacctgtgacccatatgtattcgtttgctggggcctccatcaccaaataccatagattgggtggcttacacaacaagaatttattttcacacagggttggaggctggaagttcaaaatcaacgtaccagctagattggttccttctcagacctctctccttgaattgcataaataatttgttttgttttggtaagttttaaaacttgacttttttcccttcaagggcctagaaaacacatagacatattgtgacttgtgtgtatgtgtgctagctagaatcattcatactccaaatctctctcacattacagattaatgggttggatgcaaatggtatgtattgaccaacagccccagctgaggtccagttgacagtcagcatcaactaccagacatgggaatgagcaaccttcagatgatttcagcctccagttgttgagtcgcctcaaccttgaatattcccagtagagacccaggcactatgcagcaaaatcaaggcatctttttctgcatccattctgaattcctgacccatagaatctgatagcacataaactggtttctattttatgcccctaacttggggcatggttgggttttgtggtttggggttggggttggtttttgctttgttttgtttcgtttgagatagggtattgctctgtcaaccaggctggagtgcagcggcgtgatcatagctcactgcagcctcaaactcctggcgcaagcaatcctcccacctcagcctcctgagtagctgagaccacaggtgcacaccaccatgcctgcccccaaaaatgttctcatatcattgcccttccctgtatccccacctttggctgtgtaactttgcaatactcttattatgagcaaaacatatggtctcacctcttgactttggatttcgttatacgacttgctttggacaataattttaaaaaccacaaaactgacagtgtgtcatttttgagcctaggtatattagtcagagaaatagaaccagtagtatagtaaagatacacgagacagagacagggagagagccagagggaaagatagatttatcaggaggtattggctcacgtgattatggaggctgagaagtcatacaatctgccatctccaagctggagatccagaaaagtcagtggtgtcattcagtttgactcccaaaggcctgagaaccagtgtagccaatgatataaatcctcgtctagggaccagagaagataagatgatatgtcccagctcaagcaataaagcagtaaaagaggcaaaattctccttcctccatcttttgttctactcaggccctcaacagattggatgatatccacccaactggggatgatggcagcctgctttactgagtacagtgattcaaacgctaatgatacaggagctaaaaagaaattatttaggcagacagtgagggtaagagagtcctcagcagaattacccttttaacaaaaagcagcccccaaataatttcttttctaacaaagagcagcctgaaactttgagctgcaaacatagataagcaagctggaagcttgcacaggtgaatgccagcagctgtgccaatagaaaagggctacctggcatgttcaacatggaggctccatcttcccttttctttgtcaccacatgtgcagtagaaaagcaggcaacatggtgctggccaggtagagaacccatctgcataataaaacattagggtggtgaggccagcttctttgtgcactatgcaaacggcacccgtagtccaatccgggtcttcacatgctatgcaaatggcatacctggtctgaccaatccttcatgccctatgtaaatcagacatcacttcctcaagctcatctattaaacatcctgtactttgccacaaacaggaagccctgcttaggagcccctctctctctgcaggagagagatttttctctttctttcgcctattaaacctctactcttaacctcactccttgtgtgtccacatccttgatttccttggtgtgaagcagtgaaccttgggtattaccccaggcgaataatgccacttcactaatactctcaatcaggccaggcatagtggcccatgcctgtaatctcaacactttgggaggctggggcatgaggatcacttgaaccaaggagtttgagaccagactgggcaacatagcaagaccccatctctacaaaaaataaatacaaattagccaggcatggtagcacacacctgtggtcccagctatttgggagcctgaggtgggaggatcatttgaacccagaaggtcaaggctatagtgagctatgattataccattgcactccagcctgggcaacagagtgagaccctgtctcaaaagaaaacaaaggctaatggtattttttttttaattgagacagaatttctctcttattgcccaggctggagtgcaatggcacgatctcggctcactgcaacctctgcctcctgggttcaagcaattctcccacctcagcctcccgagtagctgggattacaggcatgcacaaccacgcccatctaattttgtatttttagtagagaaggggtttctccatgttggtcaggctggtcttgaattcccgacctcaggtgatccacccgcctcggcctcccaaagtgctggtattataggtgtgagccaccacacccggcaggctaatgctattaatcagaagcattgtcacagacacactcagaaaaaatgtttaatctgggcacccctttgcccagtcgagttgacataaaattaaccatcacactgggactcaagaagccttgaatgtcgccacttgcccctgccatcatcacgaggaggacatgcccagactagcccattggtcctaggaggagaatgagacacatgtggaacaaaactcagctgagatcagacaacacacagaagtaagtgaaaatagatgattgttgttttaagcccctgagttttgggatggtttgttacacagcatttttgtggcaataactaactgatacagcaagtaaggcagtgagcaagtaaggactcacaaacaatgccccaaaatgagggccccagagcaaaagtttttctctgatcttctcctgaccacctgtctctcagtcccatgctcccctgaggctagccatagaaactagaatccctcttccccaaggtgggtcatagaaccacaaccccttttttcccaaagccagccataagacctaaaaatatgactctttttctctgcctttttgtgtaaaaactggccataaagaaattatctgacccaccctgtttgactgtaggtcataagacctccattccagagagggtcttagcccatagccaggatgctgggcagttgagccccaatattggggcttagcctgggagggttcttggcttcagcctggaaaggatacaaggatgagccagaggtgttagtcacttttactgaagcagcagtgcacagcagctgtggaggtattgctccttgtggaacggggccgccccataggcagtgtacccaaagcagcagctcagaggcagtgctgcaggcatatttataacccacttttaattatgtgtaaattaaggggtggattatacaaaaatgtctagaaaagtgatggtaacttccaggtcatcagatcattgctaaggaaagggatggtaacttctaggtgttaccatggcaatggtaagttgacatggctcactagtgggcatgtcttgtggagaggtgcttttgcctcttccctgttttagctagtcttcaatctggtccagtgtccaagtcccacctccagagttgagtcctgccttctaccttacccagaaggaaataatgcttcacagaaaagccaagaagaatctagatagacagaccttgccagatttctccactcggtctattaccattagatcagaccctgtatttccaatcatgtttctgcacagctgtccatactctgtggaacctaagcataaaaacagtttccactgggcgcagtggctcatgcttgtaatcccagcactttgggaggccgagatgggtggatcacaaggtcaggagatcaagaacatcctggctaacacagtgaaaccccatctctactaaaaatacaaaaaaatagccgggcatggtggcgggcacctgtagtcccagctactcgggaggctgaggcaggagaatggtgtgaacccgggaggtggagcttgcagtgagctgagattgcaccactgcactccagcctgggcgacagagcgagactctgtctcaaaaaaaaagaaaaaaagtttccgttgtatctctgggtcttcattctgaaggcatccgtgtcatgtaaaactatgatcaaagaaatgtgtatgccttttctccaattaatctgccttcagtgacttgatttttcagtgaaacttcaaagggtgacagggaaatttctccttggcccctgcagcaggcatgcattgcttctgaacacattccagtggtgataatcgtggactcacatcttgtaaccataataggcccactgcctcatgcacacagcaagtgaatatgccaagacactgggttgcagcacagaaagacgtttaactgtagggcagctgaatgaggagttgggagggtacctcaaatccatctccccaaggagtttggggctagggttttttgtttttttttttttgctttttgttttttggttttttttttttttttgagatggagtcttgctctgtcgcccaggctggagtgcagtggcatgatctcggctcactacatcctccacctccccggttcaagtgatttactgcctcagcctcccgagtagctgggattacaggtgtgccatcatgcctggctaattttcgtatttttagtagagactgggcttcaccatgttggtcaggctggtcttgaactcctgacctcaggtgatccacccacctcagcctcccaaagtgctgggattacgggcgtgagccaccgtgcccggccggggctagggtttttaagggtgttggaggggctgaagtgtggaaatcattcgctggttgaagaatgcaggatgaagtcatgtgactggaagatgaagacactgacgtcttctgctgatcctattcctctgtgggggtcttcaaacgggttggcatcagctgttttgctggaaatcagggtctgattgtttaaggaatcctaaaacaaaagccttatgtttctaacgtcagaaattctatttaaaggaacaatggaagccaggcgtggtggctcacacctgtaatcctagcactttgggaggctgaggcgggtggatcacttgaggtcagttcaagactagcctggccaacatggtgaaaccccgtcactactaaaaatacaaaaattagtcaggtgtggtggcgggtgcctctaatcccagctactcaggaggctgaggcaggagaatcacttgaacccgggaggcagaggttgcagtgagctgagatcgtgccattgcactccagcctgggcaacatgagtgaaactccatctcaaaaaaaaataaaaaaataaaaaataaaataaaaataattaaatgtatgggacatacgtgcaattttgttacatgcatagattacatagcagtgcagtcagagcttttagggtaaccatcacctcaataacatactttgcacccattgatttttcataacccaccaccctcccaccccttctgagtctcccttgcccatcattccactctctaagtccatatgttggcatgatttagctcctgcttatgagtgagaacatgtggtatttgtgtttctatgtctaacttgtttcacttaacataatggcctctggttccatctatgtagctgcaaaagacatgattccattatttttttatcatcgaatagtattctatggtgtatatgtaccacattttcactatccaattatccatggatggacctctaggttgattcttcatctttgctattgtggatagtacttcagtaaacatacaggtgcaggtacccttttaatataatgatttattttcctttgggtagatattcagtagtgagattgctggatcaaattgtagttctatttttagttctttgagaaacctccatactcttttccatatggatctatctagatgcgcctttaattttattatttatttaaaaggaactgtcaatctgaaataagcaacagagagatcaactctctttaagaaagaattttttttttctgagatggagtcttgctctgttgcccaggctagagttcagtggcacgatctcagctcactacaacctctgcctcccaggttcaagtgactctcctgccttagtctcccaagtagctgggactacaggcgtgtgccaccatgtccggctaatttttgtatttttagtagagacggggtttcaccatgttggccaggatggtctcgaactcctgacatcgtgatctacccgtctcagtctcccaaagtgctgggattataggcgtgagccaccgttaccagacaacaaagaatttattcaggaatagcaggggattacaatctgagatccgcatgctatggcccaccgtaggagcatccaaagaggttagggcaggggaaactttcgaaagaaaaaaaagagccaggcgtggtagctcaggccttcaatcgcaatgactagggaggctaaggtgggaggatcacttaagcccaggaggtcgaggctgcagagagctataatcatgccatgtactccagccaaggtgacagaaaccctgtctctttaaaaaaaataaaatttaagtctgggcacggtggctcacacctgtaatcctagcactttgggaggccgggtgggtggatgaataggtcaggagtttgagaccagcctggccaacatggtgaaaccccgtctctactaaaaatacaaaaattagttgggcgtagtagcgcgagcctgtaatcccagctatgcaggaggctgaggcaggagaattgcttgaaccagggagacagaggttgcagtgagccgagatcgtgccattgcactcccgcctgggtgacagagcaagattctgtctcagaaaaaaaaaattaaaaaaataaaaaataataataaatttaatttaatttaatttaattttttaaaaaaagaaaaataggaaaggcccaaatgaactgttttgaaacaaagaccattggttgcaggagcttgttgcgggagtttattagttcattggtggacacggaaacacttgtcactcaggcagctgtccttgcacaagtagcttatctgggccgggcgcagtggctcacgcctgtaatcccagcactttgggaagtcgaggcgggtgggtcacgaggtcaggagttcaagaccagcctagccaatatggtgaaaccccgtctctactaaaaatacaaaaattagccaggcgtggtggcgggcacctgtagtccctgttactcgggagattgaggcaggagaatcgcttgaacccaggaggcagaggttgcagtgagctgaaattgtacctctgccctccagcctgggtgacagagtgagactccatctcaaaaataaataaataaattaattaatttatttatttatttatttatttatttatttataaaagcaagtagcttatctggaatatcacagctctgaaaaattctttggatgtccttagcatgggcatacatgctccagggctgcctcttcatggcctcctgggtccattgtgttaggatttgatgtaagtgactccattttgatgctaataacttctgcaaaaccaccctcagccaatggttctgcaacttgcacattttcacatagtaatatatagtggagatctttccaaaatattacactctacccaggtctatgtctttcttcttaataactgcattagtattgtaatactaacactgtgtcttaatttgttcaaatcaatccccaaatgagggacactttccagttttgggctatttcaaataaggctacagaaaatatcttcaacccggccgggtgtggtggctcacgcctataatcccagcactttgggaggccggggcagatggatcacctgaggtcgggagttcgagaccagcctcaccaacataatgaaaactcgtctctactaaaaagacaaaaattagccaggcatgttggcacacgccggtaatcccagctactcaggaggctgaggcaggaagaccgcttgaacccaggaggtggaggttgcagtgagccaagatcgtgccaatgcactccagcatgggtgacagagcaacactccgtctcaaaaaaaaaaaaaaaaaaaaaagataatatcttcaaccctatatcttggcaaactctctctggagagtaaatacctagcaataagatttccaggccaaagcctattagtagctatctccaatttttctccaggaagattgcattaatttatactaccatgaataatgtaggagcgcatacatttctatatatgctcagggaagtaagtcacaaaaagacaaatgttatattattccatgaggccttagagtagtgaaattcatagagacagaaagtgggatggtggttgccaggggctgggaataagggagggatgcatcaggagtgtttaatggggacagaatttcagtttcgcaaaaataaatgagttgtttcagtttgttgtttgtttgtttctttttttttctttttgagatggagtctcgctctgtcgccaagctggagtgcagtggcgcgatctcagctcactgcaacctccacctcccgagttcgagcaattctcctgcctcagcctcctgagtagctgggactacaggcgccccaccaccatgcccagctgatttttgtatttttagtagagatggggtttcaccatactggccaggctggtctcgaactcctgacctcagatgatccgctcgcctcagcctcccaaagtgctgggattacaggcgtgagctaccacgcccggtgagtcgtttcagttttacaagaagaaaagagctctggagacagatggtgttgatgattgcacaacaatgagaatgtacttaatgccactgaactgtccactttaaaatggagagggtagtaaattttatttatgtgtatttttactatgggtttttttttttttttttttttttctaaatgggtaggccgggcatggtggcttgcacctgtagtctcaggctactcaggaggatgaggccaggagttgaagaccagcctgggcaacacagtgagacactatctttataaatacatttaaaaacaaaaattagccaggcatggtggcttgtgtctgtagtctcagctacttgggaagctgtggcgggaggatcccttgagaccaggggtttgaggctgcagtgagctgtggtcgcaccactgcatctagcctggatgaaagagcaagaccctgtctctaaaaaattattaaacaaaataaaaaactttttttaattgggcaaaaaaggccaggcgcctgtaatcccagcactttgggaggccgaggcaggtggatcacctaaggtcaagagttggagaccagcatggccaacagggtgaaaccccatttctacaaaaatacaaaaattagccagcatggtggcgggtgcctgtaatctcagttactccaggaggctgaggcgggagaatcgcttgaacccgggagacagaggttgcagtgagccaagatcgcgccactgcactccagcctgggcgacagagcaagactccatttcaaaaaataataataataaaataaataaatagggcaaaaaaaaatcaagcatctctaacaactacctctgtagagctctttgctgtaaacacattgctttcttaatgcttcttgggtaatttcagcattgggttagccatttggaaagttattaataggctccatcctaactcttatcaggacaatcatctcctaattctagggcctagttgtcttttctgcctggagagctcccacagcacccacaaggcatcactaagattcacagggttaggtatctttccagcagcagatcaccacagaattttggcatcacacatattaagaaattaaagagcaaaagtgcctagtttagaaaccagtgatccgcacagaaatgcatggttcctctaaaaggcccttaattcagccaggcacagtggctcacacctgtaatcccagcactttgggaggccgaggtgggtggatcacctgaggtcaggagtttgagaccagcctggccaacatagtgaaaccccgtctctattaaaaatacaaaaattagccgggcgtggtggtacgtgcctgttatcctagctactcaggagggtgaggcaggaggatcgcttgaacctgggaagcagaggttgcagtgagccgagatggcgccactgtactccagcctggacaaaagagtgagactgtgtctcaaaaaacaaaaaccataaaaggcccacaattcaaacatctggtgtccatttaggaagccagttggtcatagctgggaaggttttctcccattcgatcgtagggtctctccaagtgcacattccccacaaggacatagccataaagaatacatgagcaaagtaaaagagaatcctgggaaaatctttcgtttttaacaatacttatttcattatggaagtaacatactcatcagttaaaaacttgaagatgggcagggcttggtggctcatgcctgtaatcccagcactttgggaggccgaggcaggtggaacacatgaggtcaggagttcgagaccagcctggccaacagtgaaaccccatctctactaaaaatacaaaaattagccaggtatggtggcacacacctgtagtcccagctactcgggaggctgaggcgggagaatcgcttgaacctggggggcagaggttgcagtgagctgagatgaggccattgccctccaatgtgggcaacagagcgagactccatctcaaaaaaaagaacaacttgaagacgtagacaaataaaatcacccattgtgataaatagatagtttgggggggttttggttttgttgttattgttgtttcagagacagtgtctcactctgtcacccaggctggagtgcaatggtgcaatcttggctcactgcaacccccacctcccgggctcaagcaattgtcccacctcagccccccaagtagctgggattacaggtgcacaccatcatgcctggctaatttttatatttttagtagacatggggttttgccacactgcccaggctggtcttgaactcaagaccgctcaagccatcttcttgactccgcttcccaaaatgctggaattacaggcatgagtgagccactgcgtccggcctagatagtgtttttcaattgtgcagcatccatatttcctttttttcctgaaagcaatggcctgattctcccttggaaaaccacccacccccttgactttaccttcctccttccgtgtggctggacaagactgattgcatctctagctcctggggtaggctttccccttggaagagtcccatcccctgtcctctgagattggttgaagggtaaacgacccacactgagccaatcagatagtgccaggattttgaatgaagctggcaggaaagagatgagctttttccatcggtgtggataaacttgaaaaaactaagcctggaatgatcggggtctatgatgccaccatgaggggagagcctgcctgagaatgaaatctgagtggagaaatacagacagtgtcctgacaatgtccttcagtcatctgaatccaactatgctcgaagctaaatctatccctgaacttttcagcaatgggagcccattgattccactgttgttatttttgttgaaggcaatatgatttctatttctgatctgggcaaccaacccatccatcttccaaacccaaccaaggcatttttctctgaagtctttttttttttttttcctttgcactggtatttgaactttttatgtatttgagaccacagtatttctgtatctatgtatagctatagattatattagttggtctttgcaacaacaattctacataatggactaatctcaaaacttctttttcttctttacaggtctgggagtcagcaggttttgtagcaggttcagatttgccatcagcactaccatgccctgtgatcaaagtcaatggaaaaagaacccaattcaggcaggactaccaatgtattcggttggtggaaaattaattgtggtttttgccattgaaagtaacagcccagactcttcaggagtgaaggtttgggtcaccctgttaccggaaaggggtccctatccagaccccaagagagggctcttggatctcacacaagagaattcagggtgagtccacagagccaagtgaaagcaagtttattaagaaagtgaaggaataggctgggcaaggtggctcacaactgtaatctcagcactctgggagtccaaggtgggtggatcacctgaggtcaggagtttgagaccagcctgaccaacatggagaaaccccatctctactaaaaatacaaaaattagagacaggagtttcactatgttgcccaggctggtcttgaactcctggcctcaagcaatcctcccaccttggcctccaaagccaccatgcccagcctctgaggagctttataatcacacacacacagagatgctccatcctgcatggggctgccctgattcctgttaaaaccactagcctacagatacagtgtttctttttttattttatttatttatttatttttttagatggagtcttactctgtcacccaggctggagtgcagtggcactatctcagctcactgcaacctctaactcccagggttcaagccattctcatgcctcagcctcctgagtagctgggactacaggcgtgcgccaccacacccggcaaatttttgtatttttagtagagatgggatttcgccatgttggccagtctggtctcgaactgctgacctcaagtgatccgcctgcctcggcctcccaaagtgctgggattacaggcatgagccacagcgcccggcccagatacagtgtttctaacagtgtgtctcatcacccttagatatgctgggtggtgggaaggcagagaaggaaggacaaaagccactgcttatttcaattacctacctttcaccacattggtgagggggggattcttgccctagtgttatgcagatggccaaacacatgcctgacatgggacagatgagactgacagccatttattagttatttacactcactgcctggagaaaggagacactgttgaaactgcctttgcaaaattatgactgagacagtcaaagaaatctaactgaatcgactccatcttgcttctaacctccaagctgtccttgttcattccttggcgtaggctggactaactttgggagaaactcagtttatagtttatagtttaaaacaaagatgacagactgggcacggtggctcacgcctgtaatcccagcactttgggaggccgaggcaggcagattacctgaggtcaggagttcgagaccagcctggccaacatggcgaaaccccgtctctactaaaaattaaaaaaaaaagaaaattagctgggcgtggtggcgggtgcatgtagtcccagctactcaggaggctgaggcagaacaattgcttgaacccgggaggtggaggttgcagtgagctgagattgcgccactgcactccagcctggcaacagagcaagactctgtctcaaaaaaataaataaaataaaataaactctgctccctcactgcactccagcctgggtaacagagggagactccatctctgaaaaaagagaaaaaaacaaaaaactctgctttttgaatatttggggagactgattttagtcataataaaactctggtctcccgcacggccagctctgtgtgaattactctttctctattgcaattcccctgtcttgataaatcagacagcagggaactgaaaccctctgctcagagataaacaggaactgtacctggtccatttaataaagagagctgcttggctttggggtaggggtggtaacttctccatcagggcagagtagggaggggactttgggatcagtcatttgaagccctcctggtttcaccagctgtcaaggcagcacataacattgagccttaattttaggctttgcaccacgtcgcttctgggcattattttttagcaagtgttatggggtgacagaaaggaaagataaaatattctcccagagggacgttattcataatcgctgtgagttgtacagaaatcagtatacggtgtctttttttttttttttttcttgtccaaggaaactaaactccaaacgaagtgaaataaagttggagagaactttaacctcgctgccatggaaaccacatttctcactcatggggcaaagagggtttatgtgaggatctcctgagtcgataaggtatctggacattggcaattccagatatttgattaacaagcaggaaatcgtaaggatttcctaagattgactagccgaggaagggaagcttgggataaaagaagtgcttctttcaggagaggcatttcctaccccttcattctaaaccagggctcctggccgggcccagtggctcacgcctgtaatcccagcactctgggaggccgagacaggtggaccacctgaggtcaggagttcaagaccagcctggccaacatggcaaaaccccatctctactaaaaatacaaaaaattagccaggcatggtggtgggtgcctgtgatttcagctacttgggaggctgaggccggagaatcacttgaacccaggaagcagaggttgcagcgtgccgagatcgcgccattgcactccagcctgggtgacagagcgagactccatctcaaaaaacgaagaaacaaacaaacaaaaaaagattctcataaggatcacgcatcctagatccctcgcatgtgcagttcacaataggattcgtgctcctgtgagaatctaatgctgccactgatctgacaggaggcggggctcaggcggtgatgcgagcaatggggagcagccgtaaatacagatgaagcttcgctcattcggctgcccctcacctcctgctgtgtggcccggtttctaacaggccactgttaccggtccatggcctggggattgggaacccctggtgtacgggtggcagtgaccacctctcagccacagggtgaccccacggaatttgtgctgttttcctctaaacacaacaattagaactccccaggggaaacgttcttgggtaatgccctgaaccccagtaagggccttggcctccaggtcccccgcctcacacttcccccatcttctggttgatcttgcacatcccaaatggctcccctcttcctattgccctgcaaggcactctgtcctcctctctctgggatttgtgagtaataaaactgtttctgttatctgttatttcatgtgttttgttgagttaccttttttttttttttttttttttttttttgagactgagtctcactccatcacccaggctggagtgcagtggtgcgatctcagctcactgcaacctccgcctcctgggttcaagcgattctcgtgcctcagcctcccgagtagctgggattacaggtgcacaccacgacacctggggggcaagatcattcgagaagctttacatcttgtaggactggccctgactccaggagggtttccttctgccagtttagttatgcagcaggaggtgcttggcgtatctccccagtgcagtcttccctatgtcatctgagccccaaagcaatgtgccctgggcctttagtctctcaaagtcttaggaaagtagctttctcttcatctctatgtagtctccaaaccagttcaaatatgctgctgggttactcaggaggctgaggcaggagaatcgcttgaacccaggaggcagaggttgcagtgagccgagatggcaccattgcactccagcctgggcgatggagcgagactccgtctcaaaaaaaaaaaaaaaatgctgctgggacaagcatccaaaccaaccctcccttttctccatagcctacaagatacatgtacaaaataacatctccctccaccttcaaacgaaacccaaaagccctcgtgggaagacgcacagcacgcgggattctcaccaccagatgcctagcatctgagatcaatgaatgctaaggacaggaatcacactcatgtcaggaggcaccaacaagtcttgatgcagcctttagtaaaacctggggacgagaactttcattttgtgagtttcctttttcatgtggattgcattgtctctactgccttctttgctttctctctacatccttgtgaagcgaagttcctttggaaaaattccagctggccgggcatggtggttcatgcctgtaatcccagaactttgggagaccaaggcgggtggatcatttgaggtcaggagtttgagaccaccctggccaacatggtgacacctgtctcaataaaaatacaaaatttagcaggcgtggaatcccagctactcgggagggtgagatatgaggatcgcttgaatctgggaggctgaggctgccatgagccagatcacgccactgcactgcagcctgggaaacagagggagacactgttcaaggcctatcttttattattattattatttttgagatggagtcttgctctgtcacccaggctggagtgcagtggcaacctctgcctcccgggttcaagccatcctcccacctcagtctcacaagtagctaggactatatgtgacaccaccacgccccactaattttttttttatttgtaccgacaaggtctcactatgttacccaggctggtatcaaactcctggactcaaatgatccagcctgcgttggcctccctaagtactgggattgcaggcatgagccagcacaccctcccttgctttagttcttaaaagagactctcgcacattggcttcaggctcagctggatccaggtccttgaacaggttcaggaatctggaacctgtctctttcatttatatatttatttgagacagggtctcacactgtcgcccgggctggagtgcagtggcacgatcatggctcactgcaacctcagtctcctgggctcaagtgatcctcctacttcagcctcccaagtagctaagaccacaggtgtgtgccaccatgcctggcttaattttttattcacttatttatttatttatttatttgttctgagacagagtctcgctctgttgttgcccaggctggaatgcagtggcacgatcttggctcactgcagcctccacctcccaggttcaagcgattgtcctgactcaggctcccaagtagctgggactacaggcatgtgccaccatgcccagctaaattttttgtatttttagtagaggcggcatttcgccgtgttgattaggctggtctcgaactcctgaactccaatgatccacccacctcagtctcccaaagtgctgagattacaagcatgagccactgtgcctggccaattttttttattttttgtagagacacagtctcactatgttgcccaggctggtctcgaactcctggcctcaggagatcctgccaccgcttcccaaagtgctgggattacaggcataaaacactccgcccagtccctggtctcctttgtgtcggcttcatcaactgtcagttccgttctccagggttagcaattctaacagaagtcccgggatgatgtctcattggctcatcttgagatatgtggttatgactgaactacaagcagagggatgagattggccactctgggtcatgtgccccattttctttctttttttttttttttttgagacgaagtcttcctctgtcgcccaggctggtgtacaatgacgtgatctcggctcactgcaacctccacctcctgggttccagagattctcctgcctcagcctcctgagtagctgggattacaggtacatgccaccatgccccgctagttttttgttttttggttttttttttttgagacagagtctcactctgtcgcccaggttgaagtacagtggtgcaaccttcacctccccggttcaagcgattctcccacctcagccttctaagtagcttggactacaggcacccaccaccacacctagctaatttttgtatttttagtagagacagggtttcaccatgttggccaggatggtctcgatctattgacatcatgatccgcctgcctcagcctgaagtgctaggattacaggcttgagccaccacacccagcccacgcccagctaatttttgtatttttagcagagacagggtttcaccacattgcccaggttggtctcgaactcccgacctcaggtgctctgcccacctcagcctcccaaagtgctgggattacaggcgtgagccaccacgcctggccctacatgccccattctaaagctggcccctttccaagcacatggatgcaaatgggataatggctcccccagggaaaatcagaagaaagaggcatggatgctgcacccgcaaatgcagctgatacccagtccacctacactaagcaagttattaaggcttactaaaacatagtgttcgtacattcagaatagaaagttactgtaatttattgagcactctattttggtattccacctagaagcctggcagacacacaatacctcccagcattgcacacaagtgtacactgatagtataaatttccataatttcctggaggaacattttgtctttgtgttatcttgaattggccacggttttcaaccgctgttctttttgcttagctaatgataaatcactgtttagcttgttattagcaatttaatttgttgtgggttgtttggcaaattctacagtgtttaataatactcatttgcatcagcagtatttttggcctataattgttcaataaatagactttaagtcatgtatgcattgagcaaaaatagaaatcatctgtactcttattgcttaagcagatgtacccacaattccccaacttttagaaagcttttaggatgacattccatttttatcacctacttgtttttctgctggaaagtgggaatgggggtgaagccttaattccctcctaattgggctgggggaaaaaatttagagctgataacttaagagaactttgcatatactggttttagtaccttggaaagtttatgtggtagagtggcagagtatatgttttaaaaactggtcttaggccgggcgtggtggctcatgcccggcactttgggaggctgaggcaggtggattacgaggtcaggagttcgagaccagcctggccaacatggtgaaaccccgtttctactaaaaatataaaaattagtcggatatggtggtgtgtacctgcaatcccagctatgcaggaggctgaggcaggagaattgcttgaacccaggaggcggaggttgcagtgagccgagatcgtgccattgtacttcagcctgggcgacaagagcaacacttcgtctcaaaaaaaaaaaaaatggtcttaaattgtggacggtcttgaaaacttgatctaggacaaaggttggcaaatttcttctaaagtggatcagataataaatctttttggttttgcaggctctagtgtctctgtcacaataactcaaccctgatgctgcagtacaaaaatagccagaggcaatacatacgcaaatgggcatggcagtattccaaaaactctttaataacaaaaacaggcagccaaccaaatttggcccgtgggccataatttgtcaaaccctggtcaaggagtttggacttctttccattggatcattaaagatgttgcaggtgtgaatttcagttcccaatttagagacttaagagatgtaatcttatttttgttttttgtgcatttttttttgtttgtttgttttgagagcctcgcactgtcgcccaggctggagtgcaatggcgtgatctcggctcactgcaacctctgcctcccgggttcaagcaattctcctgcctcagcctcctgagcagctgggattacaggtgcccaccaccttgcccagctaattttttgtatttttagtagagacgaggtttcaccatgttggccgggctagtctcaaactcctgatctcgtgatccgcccacctcggcctcccaaagcactgggagtacaggcatgagccacctcacccggccaccttatttttctagaactgaaagtgatcactagttcaagtcctcattcttcaagagtggtgaaaagttcatctcaggtcaactcggagtgcttctacccttttccttggtaccttggtgctgcatcttatttccctagggcttggatggtacctagatgtgggagacagaagggtgagataaattgccaagtcattgcctccttacaatggcctcatggagggttcctcagaattgtgatgcttgattattggctgccatgagttgaactgagtcccccaaaaagatatgtttaagtcttaacccctagtacctcagaatatgatctgattaaggttgttacagatggaattagttaagatgaggttatatcgcagtacggcaggcccttaatccaatataactaatgtccttttaagaaaaagaggctgggcgcggtggctcacgcctgtaatcccagcactttgggaggccgaggaggatggatcacctgaggtcaggagttcaagaccagcctggccaacatggtgaaaccccgtctctactaaaaataaaaacattagccgggctcggtggcatgcacctgtagtcccagctactaggggctgaggcaggagaatcgcttgaactggggaggtggaggttgcaataagcggagatcacgccactacactccagcctgggtgatagcacaagactctgtctcagaaaaaagaaaaagagacgagacatagagacacaagggaggaacaccatgtaacaaggcagagatccatgtgctgcagctgaaagccaaggaatgccaaggtgaactggaggcaaaccaccagaagccaggaagtggcaaagaagatatctcccctacaggttttagggaacgtagccctacaacaccttgatgtcagacttctagcctccagaagtgtgcggtggtatattttgttgttttaagcacccagtttgtgctacttagttacagcagtccttggaaattaacacatcgcccaatggtattcactcctagatccactcttgttctcaccacttcagatctcctagatgtctgagccacatccttcgtcctaagtccattttcttctttcaaagtaatagaatggtggccaggaacatggctgcctaggttgacatttcccagcctcctttgcagtcagatggagtcacatgactgagttctcaccaatggggtgtgagaggaagtgacatgttccacttcctggtttgagtcttatgacatcataagcacttccttttttttttttttttttttttttttgagacagaattttgctctgtcgcccaggctggagtgcaatcgtgtgatctcagctgactgcaacctctgcctcccaggttcaaaggactctactgcctcagcctccctagtagctgggattacaggcatgtgccaccacgcccagctaattctgtatttttagtagagatgagttttctccctgttggtcaggctggtctcgaactcctgacctcaggtgatccacccactttggcctcccaaagtgctgagattacaggcatgagccaccgtgcccaggcagcactttcttcatagtctcttcctccttcccattggctggaattaagacttagtggggatccagcattgaccaggcagacaaagcaatgctgcacaacaggagattgtaaacatggctgcacattagaatctcctgggaactttttaagaaaaaagaaaagaaaaaagataaaaaccatgtccaggccctatcccagacaaaataaatcaaaatctctgaaggtggggcccaggtatcagtgtttttttacagcttccagagtgattccaaaatgtagctacattgaagacaattgccttagagaagggtaaactgagaacaggagattggaaacctgagtgacttccaggagctgacttgctaacacggaccatttataccaggttaccaggtgagggactctgacttccccagaaaacagaccactcacttttataacattaacttccaaaacaaaagcaactttgataaactcaaaaactgcatattagtttatctacaactgagatggggaagatttcttttttttttttttttgaaacagagtctcgctctgtggtacaggctagagtgcagtggcacaatctcagctcactgcaacctgcacctctcggattcaagtgattctcctgtctcagcctcccaagtagctgggattacaggcacacactgccacgcctggttaatttttgcatttttagtagagacagggtttcaccatgttgaccagggtggtctcgaactcctgacctcaggtaatccgcctgccttggcctctcaaagtgctgagatggggaagatttctgatggagcagggttttatttcatggacttggaagaatttttttgtttttttgagacagtttcgctcttgttgcccaggctggagtacagtggcgcgatctcggattactgcaacctccgccttccgggttcaagtgattctcctgcctcagcctcctgagtggctgagattacaagcattggccaccacgcccgcctaattttttgtatttttagtagaaacggggtttcatcaggttggccaggctggtctccagctgctgaccttaggtgattcacctgccttggcctcccaaagtgctgggattacaggcgtgagccaccacgcccagctggaagaactcttaatcccacccctgaccattccattcctcttatagttcatgagatctctgctcctctgtcctatctacttccactgcattttcaaacaagtcgttcaattttcaatctttctttatttgtttttgttttgttttgagtgagagtctcgctctgtcacccaggctggagtgcagtggcgtgaccttggctcactacaacctccacctcccgggttcaaatgattctcctgcctcagcctcccgagcagctgggactacaggcgcccaccaccacgcccggctatttttttgtatttgtagtagagatggggtttcactatgttggccaggctggtctcgaactcctgacctcgtgatttgtccacctcggcctcctaaagtgctgggattacaggcatgagccaccccgcccagcctcaattttcattatttcaaataacatttattgagtgcttactgtgtaccaggtattgtactgagcattttccttgtaatagtggatttaatcctcacatactgcagtgcagtaggcattgtcattactacattctacagataagaaactgtggttcagaggtacaatttaccaagttctatctaggtcacggtctatgctttttaattaagtatactgtcctatattccttctgaatgttattaacaaattttgttaataaaatgtcactttttttccttagagtcaaggttttgatctgtcacccaggctggagtgcagtggtgtgatcatagctcactgccatcttgaactcccaggctcaagtggtcctcccacctcggcctcccaagtagctgaggttacaggcatgcatcaccatgccaagctaatttttaaattttttgtagagatggggtctcactgtcttgcccaggctggtcttaaactcctgggctcaagcgatcctccagcctcagcctcccaaaatgctgggattactggcatgaaccaccgcacccagccaaaatgtcacattttatatgcccaatatgctttcagaaatgttaggtgcagtacacattaagtatggaagtcaatgaatttaagactttaaaagactgtatagatagtttttaatttggctccttttttttctttttgagacagagtcttgctctgtcacccaggctggagtacagtggcatgatctcaactctacaacctctgcctcctgggttcaagcaattctctagcctcagtctcccaagtagctgggattacaggcatgtgccaccacgcctggctaatttttagtacagacggggttttactatgttggccaggctggtctcgaactcctgacctcgtgatctgcccaccttggcctcccaaagtgctgcagttacaggagtgagctactgcacctggccaatttggctcctttcttaaaggtgagaaaactgagactgcattcacctatttgtcattcattcaacaaatgcttactggatattgacaagggctcactgttattgagagctaactatatgtcaggcactgttctggaccgttttcagatacttactcttgaaaccctcaaacacccttgtgatgtagccaactaatgggtaacatctctagttaccctatttcatgaatgaggaatccaagatacaaaaaagtaaagtccacactaatagtgggtggtggagaaagaattcaaacacaggaatctgataccacaggcacaatgctacattagctcataacttaaaagtcaccaaacacatgagaagctgctttgaaagacagaagaaataatcaaaaggagaagtaaatccccttccagtgtctgcagatactgggattgtcagatacagaagagtagtcatgagagaaatgactggagaaatgaaagacggctggacgtggtggctcaggcctgtaatcccagcaggtgcgtcacctgaggtcaagagttcgagaccagcctggccaacatgatgaaatcctgtctctactaagattgcaaaaattacccgggtgtggtggtgcatgcctgtaatcccagctactcgagaagctgaggcaggagaattgcttgaacccaggaggcagaggttgcagtgagccaagatcacaccactgcacttcagcctgggcaacagagcgagactctgtccaaagaaaggaaggaaggaagggagggagggagggggggagagagacaggaaggaaggaaggaagggagggagggaaggaaggaaggaaggaagggagagagagaaagaaaggaaggaaagaggcagtcataaaggtgatcaaagaacaagaaactttggggaacaaatagatgctttccaatataacataaaaatgaaaaatataatcgctgaaataaaaactcaactgacaaaaatcagcttaaacacaacccaagagtaaatgagtgaactcaaagatgtagctgaagaaataaccttgaatgtaacacaaagagacaagagatataaaatatgaaacaggctgggcgcagtggtctgtaatctcagcactttgggaggctgaggcaggaggattgcttgagcccaggagtttgagactagcctgggcaacaaagtaacaaagtaagatctcatttctacaaaaactaaaaaaaaaaaaaaaggtcgggcatggttgcatgcacctatggtctcagctacacaggaggctgaggcaggaggattgcttgagcccaggaggtcaaggctgcggtggaccatgatgatcacaccactgcactccagcctgagtgacagcatgagaccctgtctcaaaaaaacaataagtaaatgagaataaaaaataaaataaaatatgaaacagtaagagagatgaagggtaggagtattaaatttggctaggtgaggtgactcacacctgtaatcccagctctctgggaggcaggccaaggtgggtggatcacatgaggccaggagttagagaccagcctggccaacatggcgaaacccctgtctctactaaaactacaaaaattagctgggcatggtggcacacgcccataatctcagctactggagaggctgaagcaggagaatcacttgaacccggaaggcagaggttgcagtgagccgagagcatgccactgcactccagcctgggtaacagagcgactctgtcttgagaaaaaaaaaaaattaaattctagatgcacttaatcaaacatcccgaagaatcaaatagagaaaatggaggcgaggcaagatttaaagagataagacctgcaaattttctaaaattgatgacaaaccgaagtccacagactaaagacgcacagagtgaagatccaaccaggataaataaaaagaaatatatgcctaggcccatcttggtgaaacaaaacaccaaagatagacagaagatcttaacagcagccaggaagaaagtagacatcatctacaaaggcctggccatttcaacccaggtgactttccatcagtaatagtggaagacggaaggcattggaatgataccttgacataattggagcaaatgccattctccattcaagacccttgacagctttggtgccgtgagggttgaggaaggtcaccagtgaggaccactgggccctggcatccgaaaaagcaggtcactcatggaaagcactagaagcagagacggtagcaaggagactgccattgggactttattttttatttttatttatttattttttgagacaggatctcactgcgtcccccaggctggagtgcagtggcaacaatcttggctcaccgcaatctccgcctcccaggttcaagcgattctcctgcctccccagtagctgggattacaggtgcccgccaccatgccagggttctgttttgttttgttttttgagacgcagtcttgctttgtcacccaggctgtactataatggcactaatggcacaatctcagctcactgcaacctcctcctcccaggttcaactgattctcccccctcagcctcccaagtagctgggattacaggcacctgcgatcatgcccagctaatttttgtatttctattagagacggggtttcactatgttggccaggctggtctcaaactcctgacctcaggtgatccacccgtctcggcctcccaaaatgctgggattacaggcgtgagccactgtacccagccttgccattgggactttaacagcagcaaatctgttatgagcaaagtttttcctggacacaaatgaaacatccccccgcccgccacaccgcagaatcctgcaacatagtgtgggaagcttgtagcgaggagatgttgaggtcctccatgtggaaaataatgaggtattgaaattcaggcattaatgttaatggggccccatttgtatgcagtctaattgggactggacttttttgcttttagggtcgactaactgaccaataaattctaaattttgtttacaaactttggctcaggttaagctctgaatccatttgtctcagatacactctattgcccagatagtaagtgaatgtattagcatataaatgagattttgaaacaaagacatcaagatattgaagaagctgcatgcggtggtgcattcctgtagttccagctactcagaatgctgaggtgggaagatcacttgagcccaagaagtggacgctgcagtgggctgtgactgcaccactgcacttcagcctgggcgacagagccagaccctgtctcaaaaaaaaaaaaactgaacaaagagattcaagaaaacaatggctcaaataagaaacaagtttaactctctctcacctaagaatccagaaggaggcagatggtctgacacaagcagggggctccactgcacaaagtcacccagaaacccagctctttccatctcgctgatccattatatccaggatatgttttcttccatatgccaccctggctcacgacagtgtccttattggagtcatcatgaaagtagtaaagagaaaaagtagagagcaagcatttcattttatggaagcaacacagaagttacattgtttttccactcatattctattgctgggaccttgttcacatggccttatatagctgcaagagaagctgggaaatgtagtctctaactgggcaaccatgtgccctgctgatactcaagggagttctattcccaaaagtaggaagaggagaggggtttctgggacagatgacaatgtctgccatgaggggacaggagatgaaaaagaggatgccacagttaactcacaattatttttaagaaatagtaataatagctaccacttatgtacaatgtaccaggcactattctaagcatttgtatcaactcctttaatcctcagctctctgaggtagttactattattaatcccattttgtaaacgagaaaaagacataaataatgtgacacatgtctaataagtggtataactagagcgttaaaactctttagtcaaagccttaagaaaattcattttcaaacagtgactttggtcaatgcagtagctcgcacctgtaatcccagctgctcaggaggctgaggtgggaggatcacttgaggtcaggaatttaaaaccatcctgggcaacatagctagaccccatctctaaaaataatcttaaaaattagctgggcatgggggcttgcacctgttagtcctagctactcagtaggctgaggcaggaggattactttagtgcaggagtttgatgctgcaatgagttatgatcatgtcactgcactccagcctgggcaatggaccaagacctcatctcttaaaaaaaaaaaagtgattttgcattcacctataaagtaattatttgagggaatgcaaagaacgtttttaggactatgaaaaagaaagctagcaaagcaactgatttctagtttagtgcaaggaaggcaaaccatttactgaatagagaaaaaaatattctctctagtttatctctaaaagtaaatgctttgagaacataatctatttgcccttgggatgaagtcagagcaatttcaatctcaggatccaatctttctgccaaatatggtctctgttactaaccctcttgactagaaatctttgggagccaaagaatattcctttcctttccctaatatacagatgctgagagcaaacgtctgtctcctgggaatcctggcaggaaaaaatctaagattttttttttttttttttttttgccaccaagctactttgggaattaagatcattaaagactaatagcagctgctacgtacttagcaaatggagctaatcagacttccacaagtggggaagtatctaaatacaccactgctgctaaatcccagtcttgactgtggtgatatccattcccctcctgaccaggtaattagaaagaactggataatcactttagcaaaatagcagatgcagtgatatatcacacctgtccacaagctgtgtggcaggataaaaggtgaaaagtgcctctgagctgagaaatatcacagtaaaaatgatgcatcatagaagctgaaattcacagagccagcccctgtaagaagtacctgacacaggagcagtggagactcacagagtgggtatgttgcagacccaccaggtttgtatgcctgctgtgcagtaacataccaatcaaccaagacagcagggtttgcagcagagaaagagtttagtgctcacagggcatctgagtgaggagaaaagaggaacccccaaatctgtctccccaaggagttctgagctggggttttaagaggatcatggagggcaaggactggaaaattgagtctgattggttggggtaaggaggatgaaatcatcaagatatggaaactgcattctttggtaagtcagctctttgtggggtccttcagaccagctgacatcagtagtttcaccggccgggcacggtggctcacacctgtaatcccagtactttgagaggccaaggcaggcggatcacctgaggtcgggagttcgagaccagcctgaccaacatggagaaaccccatctctactaaaaatacaaaattagctaggtgtggtggtgcatacctgtagttccagctactcaggaggctgaggcaggagaatcgcttgaacccaggaggcggaggttgcagtgagccgagatcacgccattgcactccaggcagggcaacaagaacaaaactccatctcaaaaaaaaaaaaaagaggtagtagtttcactgatattcagggtctgaaagaacatctcaaatggaaaacttaatgcctcacaatgcttaggatgacatctatagagcagttaagggaaactataatcttgtaacagggtctacctgattctgatgcaataggaagcaaacagctataaggaagcaggccagagagcaagctgacttaatgattaatgctgaatgtgctgcaagcttggcttattttcacttctccccctccctttctccctgattaatttcataaagtttataggacgatttcaggcacagggatgcctgattggaaactacgtctcccagcctctcttggggctgggtgtagccagatgagtaaggtcttgctgatgcagggcaggttcttggctttgctcaagaaggaattcaagagtgagccggtggttggagaaagcagctttactgaggtagcagcagtgttacagctctgtgactactcctgctccccacaggcattgcaccaagagtagtagtgatctgcggtcatatttatacccaattttttttttttttgagatggagtctcactctgtcgcccaggctggagtgcagtggtgagatcttggctcactgcaagctccatctcccaggttcatgccattctcctgcctcaatctcccgagtagctgggactacaggcgcctgcaaccacgcccggctaattttttgtatttttagtagagacggggtttcaccgtgttagccaggacggtctcgatcttctgacctcatgattcacccgcatcagcctcccaaagtgttgggattacaggcgtgagccaccgcgcctgacctatacccactttcaatacatgttagttaaaagccagattattcagaaatagctagaaaatgggcggtaactttgggtgttgccatggcaaggggtggtagtttggggcgttgctatggcaatggtaaactctcatggtgctggtgggggtgtcttatggtgatgggcaacgaagaggtgcttttggtgcctttaatctgggccagagatgagtcctgcctgcctcctttcttattgccagtggaatgtgagccaaagtgatgagttgcttgcccaagtactggaacatagatgtgcctgagacccagtgtcaacctattaaatgaggacaataccctaagtaatgacctagcagcaagatgagaggaagcaggatcccaaatgactgtgtgtaaaacagctcttccctgccaacctggactgctcatggccaaatattgtgtgaaagaggggtaatcatctgtcctccacaagccactgtgtctgggagtccttttggggtttttttgtttgtttgcttgttttgttttgttttgagacagagtctcgctctgtttcctaggctggagtgcagcggcatgatctcagctcactgcaacctctgcctcccaggctcaagcgattctcctgcctcagcctcccgagtagctgagattacaggcctgcgccaccacgcccagctaatttttgtatttttagtagagacaaggtttcaccatgttggccaggctggtctcgaactcctgacctcaggtgatccaccctcctcagcctcccaaagtactgggattccaggcgtgagccaccgcgcccaggtttgttatagcttcttaacctttgccctaacacagtagactagttcatttaatcttcacaacaacccagggaactggttactattattattcccatttcacaaataagggaactgagactcagagaaagttaaatatttcacccaccatcccaaaatcaacaaatgatgcaaacagaagtggaagccaagtttcaagcccatggagaaggttctgattcagtaggtcctagacagaggctgaaattctgcatttctagaaagctcccagctgaggctgggaggtccatggattataatttgaggagcaaggatttaaaccactcccctcccttgtctcccctaagagttagaaactgactgtccaagcctgagcagtgtagtgagacctcatctcaacaaattttttttaattagctgggcatgatggtgcactcctgtaatctcagctacttaggaggctgaggtgggaggatcacttgagcccaggaggtcaaggctgcagtgagccatgattgtaacactgcactccagcctagctaacagagtgagaccctacctcaaaacaaaaaataaaaaaaagaaagaaactggctgggcgcggtagctcacgcctgtaatcccagcactttgggaggccgaggcgggtggatcacctgaggtcaggagtttgagaccagcctggccaacatggcaaaacccatctctactaaaaatacaaaaagtatctgggcgtggtcgtgcacacctgtagtcccagctactcgggaggctgaggcaggagtactgcttgaacctgggaggcggcagttgctgtaagccaagatcattccattgcactccagcctgggtgacagagtgagactccgtctcagaaaaaaaagaaactgtccagattcccaagttctagtctcaggtatctaaatgacaaccaataatagcttcctaaaaatgttttgccctttctgtactgttcccttctcctggaaattagttgaattcatatattcagttttcttaataggcaaattctctttcaagctttgaatttctcctaggcaggtgtcacgcttccaaggagcagttaccatgaaattgtgaaatatgatgccactttctggagatcttgtgacagctgtctcaccctctatcttttcttactctggctctgtaacccaaaataacattcaatgaggcttcttgggaaaggtgacatgtcattctgtgctgtttcaacaggaaacattgactacaataagaaacaccctcagcctggagagatattataatcaacagcaaaaaaccatttcagcacccaaaacacttgggaaatgtatccttgttgcaaacccaacttcagcctgaaaaatcatcgcattctaaaagtaaaccaaaggctggttccggtggctcatacctgtaatcccagcactttgggaggccaaggcaggaagatcacttgaggccaggagtttgagacaaccctaggcaacacaggaagatcccatctctgaagaaaaaaaaaaagaaagaaagaaaaattaaggctgggcgcggttgcccatgcctgtaatctcagcacttgggaggccgaggcaggcagatcacttgaggccaggaattcgagaccagcctggccaacatggggaaaccctgtctctactaaaaatacaaaattagccggcatggtggtgtgcacctgtagcttcagctactctggaggctgaggaagaatcacttgagcctgagaagtggaggttgcaatgagctgagattgtgccactgcactccagcctgggtgacagagtgagactgcctcaaaaaaaaaaaaaattaaaacaattagcatggtggcatgtgcctgtagtcctaactattcaagacaagaggattgctggagcccaggagttcaaagttacagtgggctacgatcaagccactgcactccagcctgggctgcagaacaagaccctgtctcaaaaaaaaaaaaaaaaaaaaaaggaaggagccaggggagcttattggtgactctgagatgtccaaggataaatctggcttcaaacatggctagatccagggctgccaaagataatattaggactcacgctctctctccatctgtcagttctgccacccacaggatctccccctctcccgtaaccaccatgagagctatggtggataggatcgcattttttatttatttatttatgagacagagtctcgctctgtcccccaggctggagtgcagtggtgctatctcggctcactgcaacctccgcctcccggatttaagcgattctcctgcctcagcctcccgagtagctgggattacaggcacccaccatcaatcctggctaatttttgtatttttagtagagacggggtttcaccatgttggccagtctggtctcgaactcctgacctcaggtgatccacccgccttggcctcccaaagtgctgggattacaggtgtgagccaccacgcctggccagattgcattttcagaaatgcagtacctctgcactctgcatgtgactgtgccctcccaccgtgggtagagtatatttccccaccacactgatactggggttggtcatgtgacttcctctggcatatgggatgtcagcagatgtgaacaacagatgtaaatgtgcccgcagggcttagctgagctctttcactcaagtattctgccaggagaagagcatgccccagggaattgcttacccttatcctgagaattatcaaatgtggagcagagtaaacccaaccttggatttggcaccgacagaacccaaccaatccaacagcctgaagcagagtcatttatccaagtcttgaatggaggatcagctaagccaaactggacctttagaaccctgagcataagaataaaggcttattgtgaggaagcaagtctgagttttgggtggtttgttacatggcattattatagtaacagctgtaatcccagcattttgggaggccaaggcaggaagattactcgaggccaggagtttgagacaaccctaggcaacacaggaagactccatctctgcaaaaataaaaataaaaaaaaattaagcccgggcggcccatgcctgtaatcccagcacttgggaggctgaggcagggcgggtcacttgaggccaggaattccagaccagcctggccaacacggggaaaccctgtctctactaaaaatacaaaaattagccggcatggtggtgtgcacctgcagtctcagctactccagaggctgaggcagaagaattgagattgtgccactgcactccagcctgggagacagagagagactgtctcaaaaaaaaaaaaaaattaaaacaattagcctggcatggtggcatgtgcctgtagtcctaactgagtcattatccacacaccactcaacattcactcgcaagagcgtcattcatcacttgcacccagaaccaacaccagcaaaagaaataaaatctcatacaaaaatgcacctaaagggccgggcacggtggctcatgtctgtaatcccagcactttgggaggctgaggcagacggatcgcctgaggttgggagttcgaaaccagcctgaccaacatggagaaaccctgtctctactgaaaatacaaaattagccgggtgcagtggcacatgcctgtaatcccagctacttgcgaggctgaggcaggagaattgcttgaacccaggaggcagaggttgtggtgagccgagatagtgccattgcactccagcctgggcaacaagagtgaaactccgtctcaaaaaaaaaaaaaaaaaaagaaaaataagaaaagaaaatgcacctaaaagccgggtgtggtggcacatgcctgtagtcccagctactcaggaggctgaggcaggaggattgcttgagcccaggaggttgaggctgcagtgagccacgttcatgccactgcactccagcctggggaacagaatgagaccctgtctcaaaaaaaaattattatcctactattgatagatatttgagtttcaagttttggctaaaaagcctgctgtaaacattcttctacatgtgttttggtgcatataaccacctatttctattgacatatacctagctgtagaattgctagattatatgataaatgtatattcagctttagtggaaccttccagttttccaaagtggctgtactcctatcagtaatgtatgagcatcccttcccgtcactccacatcttcactcaaacttagtatttgttgtcagtccatttatttatttatttattttgagacagagtttcactcttgtcacccaggctggagtacagtggtgcgatctcagctcactgcaacctccatctccttggttcaagcaattctcatgcctcagcctccccagtagctgggattacaggtgcgcatcaccacggctggctaatttttgtatttttagtagagacgaggtttcaccatgttggccaggcgggtctcgaactcctgacctcaggtgatcctcccatctcggcctcccaaagtgctgggattacaagcgtgagccaccaggcctggcctggtcagtccttttaatattagccattctgatggagttatagttaatttgtatttctctactctgcaagggtgttaagtaccttattgtatattggtcactttttcttctttgctttttttttgagatggacccttgctttgtcatccaggctggagtgcagtggtgcaatctcagctcactgaaacttccatctcccaggttcacgcgattcttgtgcctcagcctcccaagtagctgggattacaggcgtgcgccaccacacccagctaaattttgtatttttcatagagacagagttttgccatgttggccacactggtctcgaattcctgacctcaagtgatctgcctgccttgacctcccaaagtgctgggattacaggcatgagccaccgtgcccagcctcactttttcatctttgttttgtgaagtgcctgtttaagtcttcacccactttcttattcactcacctggcttattgatttgtgagggttctttatatattccgaatatgagtcctttgagacaagacataatgcaaatgtcttctcccagtttgtggcttgacttttcactctcttcacgggatctctgatgaataaaagttcttaattttaataaagtctaattaatcagtattttactttatgattagtgctttttgggatctgattcggcttatccaagccaaataatatgtcttctccttgaaattcacaaaagcgcacccaaatgttaggtgtttttattagcaaaatttcaaaaatgttgatttattactttttactcaaaaaaagcgaagacatttttctgttattatttctttgtaataaaagactatataagagtctacaattcttattgtctgtttgtttgtttgtttttgagacagagttttgctctattacccaggctgcagtgcagtggcattatctcagctcactgcaacccccgcctcctgggttcaagcgattctcctgcctcagcctcctgagtagctgggattacaggtacatgccaccacatctggctaatttttttatatttttagtagagacagggtttcaccatgttggccaggctggtctcaaactcctgacctcaggtgatgcacccacctcagcctcacaaagtgctgggattacaggtgtgagccaccatgccccgcctgtttgttttttttgaaatgatctcactctgtcaccaaggctggaggggagtggtgccatcatagctcactgcagcctcaacctcccaggctcaagcaatcttcccaactcagccacctgagcagctgggactacaggcagacactactatgcctagctaatttttttttattttttgtacatacagggtctcactatgttgcctaggctgaacttctgggctcatgcaattctcccacctcagcctcccaaagtgttagaattacaggcctgagccaccgcacccagcctacaactcttatagcaatgttgccttcaaaggcagtttgggccacgtgccatttttgcctctgtccctgccttcttaacctacaccctgtagaaggtgcaactccactgtaagaacaactgcagctcctcaaatatcccatgtgctgcctacatttcccagtatcccttgcgctttgattagcatcatgtgattagttttggccaatgggctgtgagcataaatgatgcatgccatttccagactgaggcagtgaaaaactggcattcctcctctctccctcttccccctgcccaataaccttggaaaccatatgttctagatgggagaagagggctggccaacctatctcagactgtgtatgagtgagaaataagcctttgttttattaagccactagatttcaggacttaactattgcagcagctggcattccttagtctaactaatacccaaggagaatcagaacagccattaataggaactaccaaaactctgcaagttgaatgcatgtcctgacagttcctttgtcctcagctcagtactgaggttatctttggcaaagttctccatcactgattttcttaggtcagattctcccaaaagcagtccctgagacaaggatctgggtgcaaataatttattaagaagtgttcccttctcagcaaactatcgcaaggacagaaaaccaaacaccgcctgttctcactcataggtgggaattgaacaatgagaacacttggacacaggaaggggaacatcacacaccaagacctgtcatggggtagggggaggggggagggatagcattaggagatatacctaacgtaaatgatgagttaatgggtgcagcacaccaacatggcacatgtatacatatgtaacaaacctgcacgttgtgcacatgtaccttagaacttaaagtataataataaaaataaaaaataaaaaaaaaagaagtgttcctagctgggcgcggtggcttacacctgtaatcctagcactttgggaggctaaggcgggtggatcacctgaggtcaggagttcaagaccagcctggccaacacggcgaaacctcgtatctactaaaaatacaaaaattagccgggtgtggtggtgggtgcctgtaatcccagctacttgggaggctgaggcaggagaatcacttgaacccataaggcggaggttgcagtgagccaagatcacaccactgcactccagcctgagcgacagagtgagatgtggtctcaaaaaacaaaaaaaaagaaaaaagaagtattcccagggtaatcaataaggggatggtggggaaagcaggacagggaaaacaaagaagcaaaacaaacattcaataccaagtgaagtttcacacccagactgttccagccagggacccctggagcgcaaactataccccaaagctggtcccacctagagacaaaggagaagggctttggaccctgtattcatcagcttgggctgctacaacaaaatgccacagacttagtgacttaagagaaatttatcctctcacagttttggaggctgagaagttcaagttcaaggtgccagcaaagtcaatgtctgcagagggctctccccttgggctatagacaactaccttctcatgtgtccccacatggcctttctctcatgcatgaagagagagacagaaacagaagtaactctctggtgtctctctctctctatttttgtttgtttgtttgttgtttgtctgttttgagacagagtctcactctgtcgcccaggctggagtgcaatggcgcaatctcggctcactgcaacctctgcctcccaagttcaagtgattctcctgcctccgcctcccaagtagctgggattacaagcatgcatcaccgcgcctggctaatttttgtatttttagtggagatggggtttcaccatcttggccaggctggtctcaaactcccgacctcaaatgatccaccctcctcggcccctcaaagtgctgggattacagtcatgagccactgtacccggcctctctctctctttttaagagacagggtcttgccctattgcccaagctggagtgcagtggtagaatcatagctcactgcagcctttaattcctgggctcaaagaattctcccacctcagcgtctccagtagctatgattacagatgtacactaccacacctggctaattattttttcatgtatttttgtagagatggtctcactatgttgcctaggctggtctcaaactcctgggctcaagcaatccttccacctcagcctcccaaagcactgggattacatatgccagccaccgcaccttggtctgctgcctctttttataaggatgctaatcctattggatcagggccccaccctgaatacttcatttaacttaattgcctcctaaaagtcttatctctgaatacagtcacattgtggggcacagggatttggagggcacacaaacatttagtccataactgacccctaaacctattgatgattggctgccagggaaggttgagcaaggtaggctccaaggcactctggccctccatatgggcagggcagctccagggcccaagaacaacctctgaaggtcacaggtgtgagcaggtagcatgtaagcattaagaaaccaggggatggatgcactgaggtggggtgaggtccgggtgtggctgcccacactgcctgctactctgatgctgtatcagcaagaaacagcttatacatttctgttgtaatgggggaagcaaactttaatcatacatctgcagatttctctcactctacgccagcctgcagatgtcttctgctagagttaaaaatttccacggaattatctccaatctcctctcacagcctggtaatttggccaaaagaaatcccagatgtttcaaagaatccctaatagtgactgtagggctttgatttctcctcatccagttggtcccagggcactgccaagccctggttggtgtccttgtcaaattgctccgagagtgagcaaaaaaacggagaaacttgtgcccaaaacccaatcaagcatttgtcttaaaagcacactcgccttgaaagccagccaacttctgtgaaatagaaaagaatccattttctgcttctatttcttggcccttgaacaggcagtgactcaagactcaagtcagtggttggtgcagctgcaatgagacatccgtcagtgagctggcatctctgacaatggcgtgtgcccacagagaggctgtgactcaggagggcaggtggcactccatgatcccccaaagcagccaagccaggtggggtgccaagcatcccaggtgctcctgagctggaagaccgacagttttctaccagttgaagtcgtgtttggcaaagaaaccgttcagccctttaacagatattgacagcctgctagtttccaaaatggggtcaaaagatggagattctcctttgatggtgtcagcgggtgcataatggatgtgtggatgttctttgtgctcagaaacgtctgccgttccatccagttgcatgctgaagggaggtggggagctgccaactcctccacgacccatttcaaagtattaaaagaattgttagcaattccaggttgctggtgaaaacatctccttggttttctttcccccacttcaaatcacaaaccaacccaaccatttctagaatacacagctctactggggtcctattccatgtgctataggagactgcaaaacaaagtcttttttctttttttttttttttttttttgagacaggttctcactccgtcccctacgcaggagtgcaatggtgcaaacatagctcactgcagcctcaacctcctgggctcaagtaatcctcatacctcagtctcctgagtaagacaaaattttactggggcaatttcaactcttcgtaaggttttaccttttgaacttgtgctttccttttttttttaagatggagtttcactcttgtgtcgcccaggctggagtgcagtggcacaatctcgcctcactgaaacctccgcctccctgcttcaagtgattctcctgcctcagcctcctgagtagctgggattacaggcggctgccaccatgccaggctaattttcgtatttttagtagagatggggttccaccatgttggccaggctggtctccaactcctgacctcagacgatccatccgcctcaacctcccaaagtgctgggatacaggcatgagccaccatgcccagccttaagccaccgtgcccagcctgctgtctttattattattatttagagacaaggtcccactctgttgctcaggctacagtgcagtggcacaatcatagctcatcgtaacctcaaactgctgggctcaagtgatcctcccacctcagcctccagaggagctgggactacaagcacacactacctcactgggctcatttattttttattttttagagatagggtcttgcttgttgcccaggctggtcttggactcctgacctcaagcaatccccctgccttggcctctaaaagtgctgggattacaggcatgagccactgcacccggcttaagttatactttctacacacacacacacacacacacacacacacaaataatcatgttcgagttgcatagacttaagaagctcaatctacttacctactttgagaatgtcttaatttgaattcccccaggagccaagcctgcgacaaggatttgaggataagtagactatttaggaaatagcccctaggaagcatcggtagagaataagcaagaaagaggggaagagaaggcagctagcaaaggatacatccttagtgagttactgctgtgggcaataagggcttaatcccctgggaaatgggaggtggaaatccacctgacagttatcccactggaggggcaagggagctggaggatggatccgtgacctctgtcagtcattagcaggaagacggcacctgggggacttagattccccagcacttctggctgtcacagtgaagacaaaacagaccctggctgcaagagaaagcccccagggaaagaaaggcaggtgctcagagcaggtcttgggagccggaaatgaagctaatgtttgctaaagtgatgagggtgagggaataggtgtgaccttgagttgctggggatgaaaatcttgctacatgagcagtactaggcttttgtgacccaacaatagagaaatagaaaccaaaagactccatggatcaggtagagttaacttacagagaaaaaaagcctttttttttttttgagacagagtttcgctcttgttgcccaggctggagtgcagtggtgggatctcagctcactgcaacctccgcctcccgggttcaagcgattctcctgcctcagcctcctaagtagctgggattacaggtgcctgccaccacgcccggtaattttttgtatttttagtagagatggggtttcaccatgttggccaggctggtctcaaactcctgacctcaggtcatccacccgcctcggcctcccaaagtgctgggattacaggcttaagccaccgtgcctggcctaaaaaagcctgtttaaaaatgttttaggctgggcacggtggctcaggcctgtaatcccagcattttgggaggctgaggtgggtggatcacctgaggtcaggagtttaagaccagcctggccaacatggtgaaacccagtttctactaaaaatacaaaaattagccaggtgtggtggtgcgtgcctatagtcccagctactcaggaggctgagtcaggagaattgcttgaacctgggagggcggaggttgcagtgaaccgagatcgcaccattgcactccagcctgggcgacaagagtgaaactctgtctcaaaacaaaaataaaaataaaaataaaaataaaaaccctcccatagatgctccatacgctctaattctgtgtctccatccactgaaagcaaaattccaaggctttggctatggtggagcctcaagatggaaagaccttggatttctgaaatcatgggccgatgatcatgaaaatgcacctctgggatctgcaagaagtgtgattgaacaagcaccccagctgctgggctctgaagtccagcacgtcataggaactgaggccatgtttcccaagggctgctcctcacccgggcctgagcagagcagggacactgtggcaagccaggtcctgagagactcagaaatcttctgggacaagcaactttggctcaatggcctggccaaagtctctcagaaatgtcctgcagtctaagatgcttccaccccaccacaacttcacatgagcaaaatcttccttctattgtctcttttttgtcaatttctggtaaataacttctattgtcttaaaacacactggagttaagggatttaggcgttacagcagcagtggttgccttaattcattaatacaggaggaaattgaggggccattgcccaaaaggttaagttcaaaaccacaactccaggactgcaattcagggatcaggaagctgatgctggccggcgcctgtaatcccagcactttgggaggccaaggcaggcagatcacttgaggtcaaggagtttgagaccagtctggtcaacatggtgaagtcccgtctctactaaaaatacaaataactagctgggcgtggtggtgcatgcctgtaatcccatctactcaggaggctgaggcagaggttgcagtgaactgagattgtgccactgcactccagcctgggagacagagcgagactctgtctcaaaaaaaaaaaaaaaaaaaaaagaaaaaagaaaggcagacaggaaaaggaagccaataaaaggtgtgataatgagcactgtattagttagctattgctgcataacaaattacctcaaaacttcagtgacattaaataacacgtatctattatctaatagtttctgagggtcaggaatctgggaacatcttaggtgggtcctcagctcttgggcctgtcataggctgcaatgtaaatacaaaaaagaaatcatgaaagtgacaagccctccttccccttgggtagatgacattggctatatttctggctataccacaccttcccattagcattcagacttccctttttggggggaattgtccagctgaaagttgtcttaacacaaggactgttcccaacactagcctcccagggcaagcctgtgacacacacttggtcaacccaaagctcattgctttggctcctaggtgagtgtcccagtgtcatttgagaatgtttgtagaacagtggcagagatggcatgtagtcagagctgtttgccatgagaccttggctctgaactctctagctgggatccaaggaggaaggtttatctaatacagacatgccaaggatgaacctcctatgaactttttatccagcgtgaatgcgcatggaagtttggcataacacacaagtgaccaggagaagggatgtgctgaactctgctaaaggcttttctcccacaatatcaaggaaggaaactgaacagagctggctttcaggcctagagacctccaccctacctggctcctatcttggaggaatactgtccccaagtgacggggagaattccaaggaacctctaggtgctaacattgacacctaaattcatgggtctgcagacttctaccatggaatgcaattgtcttcacttaggttctcccagaagtagacaatgacccaaggactcaatgggcaagtagtttgtttaagggagacgccaggagataccagtaggggaataggggtgtgacacagagaagagagggcagtccataaaggtgcatgatgagcaagttacctctgtgggcaacaggggttcagtcatgctggaaaatgctggggactgagtggaacacacaccttagagtcatcccacttgaggggagagggagctggggtatttatccaccagctcccattggtcactgattaggggggcttattagggaatgaagaatgtggctgttaattctcagatacttccactctgctattcagtctttggcagctttaaagaaagccctcaggggccaagcacagtgactcacacctgtaatcccagcactttgagagactgaggcaggaggatcgcttgagcccagcagtttgagactagtctgggcaacatagcaagaccccatctctactaaaaatgaaaaaaaaattagccaggcatagcccaggcgtggtggctcatgcctataatcctagcactttgggaggccgaggtaggcagatcacctgaggtcaggagttcaagaccagcctgaccaccatggtgaaacgccatttctactaaacatacaaaaattagctgggcgtagtggcgtgcgcctataatcccagctacttgggaggctgaggcagaagaatcgcttgagcccaggaggcagagattgcagtgagctgagatcatgccattgcacttcagcctgggcaacagagcaagactccatctcaaaaaaaaaaaaaaatagccaggcgtggtagcacacacctgcagtctcagctactcaggaggctgaggcggatggatagcttaagcctaggagctcaaggttgcagtgagctatgactgtgccactgcacttcggcctgggtgacagagcaagaccctgtcccaaaaaaaagaagaaaagaaagcaagcaagctgttgggggccgagtagagtggctcatacctataatcccagcactttgagaggctgaggtgggaggatcgcttgagcccaggaggtcgaggctgcgatgagctatgatcacaccactgtacggagcctggatgacagagcaagaccctgtctcaaaaaaaaaaaaaaatcccttgggcaagaagatacaaatactggtagctggtagtatcttcccagggttagggcaattcaacattagtatcagctacaacaatttataaccttcatggtattcactagacccccagagctcccagaatttatgcccttcctccaagcctgtttttgcagcttcttgtctattctgtgaacatctgcacttgtttccataaaacccattccttaaattgaagatccacagaactcactcctgttgcaaacaaaaaccttgactgatataccctgccatctgaaatttgcagtgaaataatctgtaaataactgggcattaacaaggcttttccagaagacaattttcaaggtaaccataaagaatgtatttatttatttattattttatttattgagacagagtcttgatctgtcacccaggctggagtgcagtggtgcaatctcagctcactgtaacctccgcctcccgggttcaagcgattctcctacctcaacctcctgagtagctgggactacaggcgtgcgccactatacctagttaattgcagttggagatcgcgccattgcactccaggctgagcaacaagagcaaaactccatctcaaaaaataaaataaaacatatgatttttgagggcgaggagcagtggctcacacctgtaatcgcagcactttgggaggctgaggcacgcgtatagcttgagctcaggagttcaagatcagcctgggcaacatggcaaaaccttgtctctaccaaaaaaatacaaaaaattagccaggcattggtggcgcagcacctgtggtctcagctactcgggaggctgaggtgggaggatcgcctgagcccaggaggtggaggattcagtgagcaaagatcacaccactgcactctggcctgggtgacagagtgagactctgcctcaaaataaaaataaaaataaaaataaaaaatacgttttattattattcatgtatggtgaggccaacagatcaggatatgactgccattagaaaacacaaaagtttgttattcactcttcccgagaggacggggcactccatgccatacagggacacatgagaaagcaccagggttggtcaggaggcagaggtagtggggaaaacataggcaaaggtctttattgtgatttccaaagaaagaagcaggcaagggccgggcatggtggctcccgcctgtaatcccagcattttgtgaggccgaggcaggcggatcatgaggtcaggagttcgagatcagcctggctaacatggtgaaaccccatgtctactaaaaatacaaaaattagctgggcatggtggcgggcgcatgtagtcccagctactcaggaggctgaggcaggagaattgcttgagcccaggaggcagaggttgcagtgagccaagatcgagccactgcactccagcctgggcgacagagggacactccatctcaataaaataaaattaaaataaagtatacagacggaggccacgcaccatggctcatgcctgcaatcccagcactttgggaggccgaagtgggtggatcacctgaggtcaggagttcaagaccagcctagccaacatggtgaaaccctgtatctactaaaaatacaaaaaaaattagctggacatggtggtgggtgcctgtaatcccagctactcaggaggctgaggcaggagaatcacttgaacccgggaggcagaggttgcagtgagccgagatcgcaccattgcactccagcctgggcgacaagagcaaaactccatctcaaaaaaaaaaaaaaagtatatagacgaatatgcataatttatatgcaaatactatgctgttttatgtcagggacttgagcatccacagattttggtatctgcaggggtcctgaaactaatcctccttggacactaagggacaattgtattccttgagttatccaataactactgctcagcagttggtaataaaagttcagaggctgcatagaatcttcgtggcttctctgatttgactctgcaacactgtttcctttcatctccagcagagcatgccagctgcccggcaggcattcaaaatccagaattgaaggaaagcatatcgtgtgatcatctacttcttggatttgagtctttcccaggtgtggccatttctggatggtggaaggagatgttcctccctggaggtgaccctcagtcacatttatccctcatcctttcctgtatcctaaaaatagccaggatgctgggagctgttaaggctgcactgaggtatttttagccttaggatcctggagttggggcccagctgggctgagctgcaatgaaggggtgtcggggggcaggtggcacctcagagagcctttggagtggcccagtaatgtctcagttctgatttctgacttaatcaatggtgaaaattgagttatgggggaagaagcagaggaaggagtgaaatgcaaaaattcattcattcattcagtcagtcagtcagtcagtcagtcagtgtcaggctctgttctcagccctgagactacaagaacgaccaaaacaaaaatctgtgccctggaaatgaacaggcagagttcagaatatctacttgtatcagaaaacaaggaaaacgcctttaaagactaaaggagtgtttttgtcagatgaacatgggaacgaactgaaagaggctctccctagtcaaaatggggaccataacattctcttctgttagtcaaaagcctgtgtcataaaaaccttgcttacagatgttcaacgtaatttcttacagctccaatcagggcaattaaataagcagaccgtctaggggtttcacataacaagaataaatagctaaatgccagggatgtttgaaaagcaaaatatggttcattatttcccctgggagagtcgcactgagccacggattaatcaaaatacggagcatagcgcactgaaaagtattccattaccaggaagcgtaatttctgacttattctattttagaatagtaacaactgctaatttctgggtcctttctaggtgctaggcattatttcatgggccccaagaccgttgtctaacttgattctagccacaactcagcaaggagtatccagaccctttttgttttttgttttgttttgttttttgagatggaatttcactcttgtcgcccaggctggactgcattggctcatctcggctcattgcaacctctgcctcctgggttcaagcaattctcctgcctcagcctcccaagcagctgggattacaagattacaagcatgtgccaccacgcctggctaattttttgtattttcagcagagatggggtttcaccacgtgggccaggctggtctcgaactcctggcctcaagtgatctgcccgcctcagcctcccaaagtgctgggattacaggcatgagccgccgtgcccggccagaatatccagaccctttaagcacattttagcaaagaagaaagaggaggaggaaaagaatagaaggagcgggagggaaaagaatagaaggaggaggagagaaaaagagggaagaggaagtattttagtaatagtcatttttttccctttcagcatgtgaatacatgtatcagttagaattcaattctgctgcatagaagagaaaaataatagtggcttaaacagggcagaggtatatttttctgccatgtaggtgtaccacagtagttcagttcatggctggcaaggcagctccacaattatcaaggaccttaaggccttctaactttctgctctgtcatccttggcttccatcctcaaggttgcctcatgaccacaaaatggctgcgagagcaccagccatcatatccatgtcccagacaatattaagaggaaagcggctagggctaaagggtacacttctcaactgagccatcatcattaaagagtttattaaaagcctcattcagatattctaggtatccaggatcctggaattccctacttaattgaatccatgcccacattcaggacttgcatgggccttttccacaggtctattatcaaagtggaatgctggcccgacacagtggctcatgcttgtaatcccagcactttgggaggctgaggcagaaagagtgtttgaggccatgagttcaaacccagcctgggcagcacagcgagaccctgttgctacaaaaaataaaaataaaaaaaaaatactaggtgtggtaattaatgtagtcccagctactcaggaggactgcgtgagtccagaagttcaaggctgtaatgagctatgatcagaccactgcactccagcctggccaacagaatgaaaccctgtctcgaaatgaggttttttacctgggaggcagaggttgcagtgagccgagattgcaccactgcactccacccagacaacagagcaagactccgtctcaaaaaataaaataaaataaaaggaaaagaaaaaagaaatttcaggcagacgaggtcgcggcgccggaggccccagaagggtcgaaggcgccgcgggctggggtcggtggcttagggagcccgtccggccatggtggccgtggctggtggttggcgcggctgcgctgcggcccggggcagtgcggagccgggacagtcgcggcgctgacgcccgcgggccccagctgcagatatgaagcggagccgctgccgcgaccgaccgcagccgccaccgcccgaccgccgggaggatggatttcagcgggcagcggagctgtctcagtctttgccgccgcgccggcgagcgccgcccgggaggcagcggctggaggagcggacgggccccgcggggcctgagggcaaggagcagccgcctgccttggcctcccaaagtgccgagattgcagcctctgcccggctgccaccccgtctgggaagtgaggagtgtctctgcctggccgcccatcgtctgggatgtgaggagcccctctgcctggctgcccagtctggaaagtgaggagcgtctcctcccggccgccatcccatctaggaagtgaggagcgcctcttcccagccgcgatcacatctaggaagtgaggagcgtctctgcccggccgcccatcgtctgagatgtggggagcgcctctgccccgccgccccatctgggatgtgaggagcgcctctgcccggccgagaccccgtctgggaggtgaggagcgtctctgcccggccgccccgtctgagaagtgaggagaccctctgcctggcaaccaccccgtctgagaagtgaggagcccctccgcccggcagctgccccgtctgagaagtgaggagcctctccgcccggcagccaccccatctgggaagtgaggagcgtctccgcccggcagccaccccgtccgggagggaggtgggggggggtcagccccccgcccggccagccgccccatccgggagggaggtggggggtcagcccccccacccggccagccgtgccatccgggagggaggtgggggggtcagccccccgcctggccagccgtgccgtccgggagggaggtgggggggtcagccccccgcccggccagccgccccgtccgggaggtgaggggcgcctctgcccggccgcccctactgggaagtgaggagcccctcagcccggccagccaccccgtccgggagggagatgggggggtcagcccccccacccggccagccgccccgtccgggagggaggtaggggggtcagccccccacctggccagccgccccgtccgggagggaggtgggggggtcagccccccgcccggccagccgccctgtccgggagggaggtgggggggggtcagccctccgcccggccagccgccccgtctgggaggtgaggggtgcctctgcccggccgcccctactgggaagtgaggagcccctctgcctggccagccgccccgtccgggagggaggtgggggggtcggcccccctgcccggccagccgccccgtccgggaggtgaggggcgcctctgcccggccgcccctactgggaagtgaggagcccctctgcccggccaccgcccggtctgggaggtgtgcccaacagctcattgagaacgggccaggatgacaatggcggctttgcggaatagaaaggcgggaaaggtggggaaaagattgagaaatcggatggttgccgtgtctgtgtagaaagaaatagacatgggagacttttcattttgttctgcactaagaaaaattcctctgccttgggatcctgttgatctgtgaccttacccccaaccctgtgctctctgaaacatgtgctgtgtccactcagggttaaatggattaagggcggtgcaagatgtgctttgttaaacagatgcttgaaggcagcatgctcgttaagagtcatcaccaatccctaatctcaagtaatcagggacacaaacactgcggaaggccgcagggtcctctgcctaggaaaaccagagacctttgttcacttgtttatctgctgaccttccctccactattgtcccatgaccctgccaaatccccctctgtgagaaacacccaagaattatcaataaaaaaataaatttaaaaaaaaaaaaaaaaacaaaaacaaaaacaaacaaaaaaaaaagcctcattcaataacttctgcttacagctcattgggccactgctatctgcattaaattaggaaatgtagtcttttagctgagcacattgttacccccaataaatatgaaggtaggggttctgttaaaaagaagaatagagccaggcacggtggctcacacctgtaatcccaacactttgggaggctgaggcaggacaattgcttaagcccaggagttttagaccagcctgggcaacatagtaagaccccttctctacaaaaaataaaaaccagcagggcatagtggtgcatacctgtgatcccagctactcgggaggctcaggtgggaggatcactggagctggggagatgaaagctgcagtgagccaagatcacgccactgtgctccagcctgggtaacagagtgaggccctgtctcaaaaaggaaggaagaaaggaaggaaggaaggagggaagaaagggagggagggagggagggagggagggaaagaagaatgaagatgaatactgagactgcaattagcagtctctgccacaataaccatgctgcattttccatctggtttttactaattgcacaggaattctagccatgcccccttgcccttacctcttcacagtctgcaaaccagactgcttcccaagtgccaaaactggggtcttttgtttgctgttgagacctgctttgccacctgtaggccacagaatgaatgcccctgagagcagctctcaactagtaactgacaaaagttggtggataaatgccccagctctctcaccttccaatgagggacttcagcctacaccacacggaacagaagaactgcccagctgagctcagccaaccatagagtcatgagaaatcatcatcattgttctcagtctctgagttctaggacagtttgttactcagcaataggtaactgaaatgggtggaatgggatagaaataaatctttgttgctttaacgcccctaaaatttagcctatcctgactgactcaccctcattgtattcaccctctgctgaaagccaggggtttaaatctctgagcaggacatcaccctcaaacaaatgtggtttacttggtcttgtggaagacacaggatttgccagctatgtacggtcaagatcaatagcaagtctaaatggctttatgtaaagggaaacatgttctgtggctgggtttggtggctcaagcctgtaatatcaacactttgggaggccaaggcaggaggatcgcttgaacccagaagttccagaccagcctgagtaacatggtaaaaccccgtctgtacaaaaaaaaaaaaaaaaaaaaattattagccaggggtgttggtgcccatctgtaatcccaattcctcaggaggctgaggcgggaggattgcttaagcccaggaattcaagactgcagtgagccaggatcgtgccactacattccaacctaggtgacagagtgagacactgctcaaaggaaaaaaagaaaagaaaaagtgttctgcccttttattatgctggtgatatccaaacataattatcttgccatattcaaggtcctaaaaggcaagtctctctctactttccagtagaaataataagccatgtgttggtgctcacctatatgttcccctacatttcccagaatcccttgcagatgagacagacccatatgactcattctagccaatggattatcgccactgggatgaggcagttaagagctgatacattcctctgtccttctctttcctccctgaggtgattttggaagccttgtgagagatggtgctgttgcaaaatggaggaagactggatctctgcatcaccgcttggaggcgagcccctgctaactagcttacaggaataagaaacaaacttgtgctgtataaagctaccgaagtttctgatttgtttgttattggtactgaatatagccttatgctgtctagcaagcatcatttctggaaaaaggatgaattctcagggaatcttgcaaacattacatgtcattatccccagctacaatttgcataattcattttctgaggggaactcacagaacttagcaaagaactaccaaagataggtaggcagcactttgctgatcccatttgtttgagaagaaaaacaattttgagacagagtctcactcttttgcccaggctggagtgcgatggtgcaatcacagctcactgcagccccaatctcctgggctcaagcaatcctcctgcttcagcctcctgagtagctgggactacaggcacacaccaccacacccagctaatttttctgtatttttgtagagacagggtttcaccatgttgcccaggctggtcttgaactcctgggctcaagtgatccactcacctcagcatcccaaaatgctgagattacaggagtgagccaccttgccttgtggaaaatttatttattatgtgatgaatatcaagcttctttgtaaagaggatatagctaagagcctctcctagcagtgatgtacataagtcactccgcccatgtaagacgcagtttccccatttggaaggctggatggaaaggtctctgcaatctatcccctcatcaaaaaaaatttttggccaagcaaggtggctcatgactataatcccagcactttgggaggccaaggcgagaggatcgcttggggccaggagttaaagaccagcctgagtaacatagtgagacacccatctctacaaaaaagaatgttttcattagcccagtgtggcagcgcatgcctgtagtcccagctactcaggagtctgaggaaggaagatcccttgagtgcaggagttcaaggctgcagtgagctatgatcacaccactgcgctctagcatgggcaacagagtgagaccctctctttaaaaaaaaaaaaaaaaaaaaaaagagccaggcacagtggctcacgcctgtaatcccagcactttgggaggctgaggcaggcggatcacctgaggtcaggagtttgagaccagcctggccaacatggtgaaaccccatctctactaaaaatacaaaaattagcccggcatggtggcagacacctgtaatcccagctacttgggaggctgaggcaggagaatcacttgaacccaagaggctgaggttgcagtgagccgagatcacgccactgcactccagcctgggcgacagagcgagactctgtctcaaaaataaataaataaataattctttttaaaaaacacgctaattctagtttcagtctggatgataatttggggaagagaagcagagaggaaaatttggaattaattccctccatgtggcaacccctgaagatcacaaaaaagttacagtgagaatgggagcaaggattctaaaacttccccactcctggggaacctgctgtcctaaatttaaacttggaagagattttggcaacaccctcctgcctctttctgccaacaaactcactgaaattaacaaatggcctgtttgcttatgtttggtctgtccttagcgcagaaacggttctctgcgcccacaactgattatatccaaatttacttccagtttttcctctcctctcccctgttgggttgtgtcctcagtttgaaaggtcacattcatcaaattagaacatgaaaggttggcacacagacatttcgtgtgaatgcctaaatgcctggagcaggataagaagttaaaagaaaaaaaaaaacttttgcaaaagaaaaataattatcataacagctcaggcacagtcctagaggtttacatatattaaatttagcaacattggacttttttaacagcctgattttctctgccgtgcatgatttcctttgcccaaacaaaccattgcaacaaatttgtaatgcatagaaatgcagctatcggccgggcacagtggctcacccctgtattcccagcactttgggaggccgaggcgggcagatcacctgaggtcaggagttcaagaccagcctggccagcacagcaaaaccccatctctactaaaaaaacaaaaaattagccgggcatggtggcagacgcctgtaatcccagctactcgggaggctgaggcaggagaattgcttgaaccggggaggcggaggttgcagtgagcggagatctcgccattgcgctccagcctgggtgacaagagcaaaaatctatctcataataataataataataataaatttttaaaaaataaaataaaataaaaatgcagctatcatcctaaaatgtaaaatgtgagaagtggtgatcgaaaataacaaaaacaagccagatgcagtggctcatacctgtaatcctggcactttgggaggccgaggtgagaggatcacttgagctcaggagttcaagaccaccctgggcagaatagggaggcctcatctctacaaaaaatttaaaaattagccgggcatgatggtgcacacctgtggtcccagctacttgggagactgaggtgggaggatcatttgagccccggggggtcgaggctgcagtgagccatgattgtaccactgcactgctgcccaggcaacagagcaagacccccgcctttaaaagtaaataaataaaagacttgttttggaatatcaaacttttagaacttttggaggatgtgactttgaaatatctcagtttgactttggggtaggttttcatttctttcttcctttctgtgatatcctatttgggttcaaattccattcctcagcctctagaattctctccatccacagatcttacaatctgcatgccccagtcttctggattttgacatcaacttcatggaacgcaccagtctccccaccaccaccttatctgtggtttcactttttgtagcttcagctacctgcggttaactgtagtctgaaaatatgtgaataccgtacaataagatattttgagagagaccacattcacataactgtaattatttgctacaattgttctattgtattttcagtcattgctgtaattttcttttttttttttttttttttgagacggggtctcgctctgtctcccaggctggagtgcagtggcgcgatctcggctcactgcaagctccgcctcccggattcacgccattctcctgcctcagcctcccgtgtagctgggactacaggcgcccgccaccacacccggctcatttttttgtattttttaagtagagacggggtttcatggtgttagccaggatggtctcgatctcctgacttcgtgatccacccgcctcggcctcccaaagtgctggaattagaggcgtgagccagtgcacctggcctgttaattttcttacagtgcctaatttataagttaaactttatcctaggcatgtatgcataggaaagcacacagtatatatagggtctggtactatctgtggtttcaggcacccactaggactctcggaataaatatattgtccctcagataatggggagccgctatagtcctaataccagggctttgctgaggggctctgtaggtttgggttttttggggtttttttgtttttgttttttttgagacagagccttactctgtcacccaggctggagtgcagtggtgtgatctcggctcactgcaacctctgccttccaggttcaagcaattcacccacctcagtctcccaagtagctgggattacaggcacgtgcaaccgtgcccagctaattttttaatttttcgtagagtcagagtttcaccatgtcggccaggctggtctcaaactcctaacttcaagtgatccacccacctcagcctcccaaagtgctgggattgcaagcatgagccaccgcgactggtcgccttcaaactctttaaaagcatcaaggtcatagaagatgaggaaaggcaggggaatgatcccacgctgaaagaagctgaagggacctcacaactaaatacaacccatgactctgaattggacctttatgccctaaaggacaatattggggctattggcaaattatgaacaaggtctgggcattagatggttgtattagagcaaatttcttctcctcgttttgacaattgtttaatggttttgcaaaagaatgctcttgggtttaggaaacaaactctgaagtattgagggacaaactgaagtattgagggacaaactcggaagtattgagggacaaaactctgaagtattgagggataacaggcattgtgtcttctgccactaactttcttcttttttctttttttcttcctttttttttttttttttgagatggagtctcactctgtcactcaggctggagtgcagtggcctgatctcagcttaatgcaatctccacctcctgggttcaagccattctcctgcctcagcctcccgagtagctgggattacaggcgcaccccaccacacctggctaatttttgtatttttggtagagacagggttttgccatgttggccaggctggtctcaaactcctgacctcaggtgatccacccgcctcagcctcccaaagtgctgggattacaggagtgagccaccacacccggcctcaacgttcaatttcttgaaattgattattttgtaatcatgtcagagaatgttctcattcttttttgtttttgagacagagtttcgttctgtcgcccaggctagagtgcaatggtgcaatctcagctcactgcaacctccgcctcccaggttcaaacaattctcctacctcagcctcccaagtagctgagattacaggtacccaccaccacggttggctaatttttgtatttttagtagagatgtggtttcaccatgttggccaggctggtctcaaactcttgaccccaggtgatctacctgcctcagcctcccaaagtgctgggattacaggcgtgagccaccgtgcccagccagagaatgttctgattcttaagagatgcacactaaagtatttgagagtgaaggatcagtatatctgcaactaactctcaaaatatctaataatgtatgtgtatgtatatacatacatatctgtgtgtatatctgtagaaagagacaggcagaaacagatgaacctacgtaggaaacgttaccgactaaggagtgtaggtgaagggtttgtaggtgttcattgtactgtaatttttctacaggtttgaacatcttcaaaacaaaatattgaaaaaataagtcacggccgggcatggtggctcatgcctgtaatcccatcactttgggaggccgaggcgggtggatcacctgaggtcaggagtttgagaccagcccggccaacgtggcaaaaccccgtctctactaaaaatacaaaaattagctgggcctggtggcaggcgcctgtaatcccagctactcgggaggctgaggcaggagaattgcttgaacccgggaggcggaggttgtggtgatccgagatcgcaccactgcactccagactaggtgacagagcaagacgctgtctgaaaaaaaaaaaaaaaagggctgggcacggtggcttacacatgtaatcccagcactttgggaggccgaggtgggtggatcacctgaggtcaggagttcaagaccagcctgaccaacctagtgaaaccccgtctctacaaagtacaaaaaattagccaggcgtggtggcccatgcctgtaatcccagctacttggaggctgaggcaggagaattggttgaaccgtggaggcagaggttgcagtgagccaagatcgcaccagtgtactccagcctgggcgacagagcgagaccctgtctcaaaaaaaagaaaagaaaagaagccacctagtctatcgcctgtgttttgattatttcaagcacggactctgagtatcaaaacatcctcctcctgagagcctaatgaaggaaacagaggaagatttgagagtctcaggaacaacttggttgccacttagacgttaaccccagatgctccccatttccaacgatacctgcaagcgtgttttcaacaacatcgtggagtccagattaaagagctgttttcctcctcaaaaagtagagactccttcaagatttgcatgagccatttaggagccagggaaccttgggatagatgtgaatcttggaatgtgggttgttagaatattttaaagctggtgagaaaaaaattgaagtaaaacaaggatgtccaggcagaggcatctgcaagacaaattagcaccatcaccaccaccccgcccccctccccaacccagtcaacaaacaggacaagtaacacttctctgccctcgtgggaacagattgagtggaaggagttgatgggtggggaggtgacgttgccaaaatcccgaaatagagctgttcaaaacaccctttcacagcatgtcagacaaatgccggagtgattaaatgttgagtggagactttgagaagctgaaagaggagggcagaaactaggcatgaaaacatactcctttcatctccttccaaatctgggtcagcactcaactgcggcatcaggacactttctcagcatctgagaagcaacatcacctaatccaagtctgtcagggcgccaaaatactctggcttccggtgattagctgatttgtgcagtatgcattcatggagtgcttatgttccaagctctggaaaacacagtagcttctcccagttcctgccatcgggagcttgtagtccagcaagggaaatggggaagtagtgataatatgcttggttgaatttttttttttttttgagacagggtcttgctgtgttgcccaggctggagtgcagtggtgcaatcacggctcacagcagcctcaaactcctgggctcaagagatcctcccacctcagcctcccgagtagctggggttacaggcactgcttgaattattgttccagttttttcaatcctctgtagatccacactctgtgtgccgtgggactttgctgttattctcaccaaaagcagaacccttgcctcttgactttgggctgtttgggctgtgggaccagctttgctcaacaggtaaccagttccaagcatccctcaagaagcctcccatgtctccacttggcttatctctgtcatcatcatgagggaagcttcctcccaagaatgattattcctttggccgaggcctcagaatgaatacatgccagccaggcacagtggctcacgcctgtaatcccagcacttttggaggccaaggtgggcggatcgcctgaggtcaggagtgtcagaccagcctggccaacatggagaaaccccatctctacaaaaaaaaaaaaaaaaaaaaagtcgggcgtggtggcaggtgcctgtaatcccagctactcaggaggctgaggcgggagaaccacttgaatccaggaggcagaggttgcagtcagccgagatcacaccaccgcactccagcctgggcagcagagtgagactatgtctgaaaaaaaaaaaaagaatgaatacatgcagaattgatctaaacccaacctgcagagagaggccaaagcatgcatcaaagctgtccagctggtccccacccacatcagccaagtcctcagacatgtgggcaaaaataaatgattgctacttttggaatagccatcacaatagcccatatgctgggctgtcaagcaagtctcaacaaattttgtagaactgagatcctacaaagtatgagcacagtggaattaaactagaagtcaacaacaaaaaagataactagaaatttacaattgtttggaaatttaaccacacatccctaaataactcctaagtcagagaaaaaaaaaatcacagtggaaataagaaaatattttgaactgaatgctaatgaacatacctgaaaaaatgctgtgggatgcagctaaagcagtgctgagaggaaaaggcatagctttgaatgcctgtatgaaaaacgaaaaaaagcttaaggtattgttatttcaagatactgagttttggggtctcttttcttgtgcagcaatagctgactgctatgataagtagcatttatactgcattcattatgtggcagacccaagtaaacagaaccacacaggttatgtgaatggccagtaaggagtaaagtcagaattcaaatccagattggctctggcattaggctctcagcactgtgctatacttctcctagaggagaaacctaacaatcacgacattgtgataaatgctattaattcatagaagtgggtggacctaactcggaggattggaaaacacttccagaaagaagtgatgcttgacctgacagttaagagaaagtgaaggctgttgaaaaggttatgcagaggcccatgggcatgaacgacatagcccatagttcagtgtggctggcccatacagtgagcatgacttgtgtcaaaaaatgagaatgaagatgtagtccagatctgattcaagcctgtctaaagagggagatgatctgattagatttgcacctcaggaagatccatctgtagtatgtggaggattggaagagagatatgatgcaaaaattccagttaagaggccatgaaagggccgggcactgtggctcacacctataatactagcactttcgagggttgaggcaggcagaccacttgaggtcaggagtttgagacaagcctggccaacatggtgaaaccccaactctactaaaaatacagaaaaaactagccgggcgtggtggcgggtgcctgtaatcccagcactttgggaggccaaggcgggtggatcacgaggtcaggagattgagaccatcctggctaacacggtgaaaccccgtcgctactaaaaatacaaaaaaaaatagccgggcatgatggcgggcgcctgtagtcccagctactcggaagggtgaggcaggagaatggtgtgaacccgggaggcagagcttgcagtgagctgagatcacgccagtgcactccagcctgggcaacagagcgagactccgtctcaaaaaaaaaaaaatacaaaaattatctgggtgtggtggtgcacacttgtagtcccagctacttgggaggctgaggcaggagaattgcttgaacctgagaggcagaggttgcagtgaggtgagatcgtgccactgcactccagcctgggcaacaaagtgagaccttgtctcaaaaaaaaaaaaaaaaaaaaaaagaggccatgaaagcattgataaagactctctttttctttctttctttttttttgggaaacaaggtctcactctgtcacccaggctagagtgcagcagtgatcacagcgctcactgtaacctcgaccaccagagctgaagcgatcctcttggctcagcctcttgagtagctgggaccacaggcatgcactactatgcccgcctaatttttttatttttatttttatttttggtagagatgggggtctctctatttttcccaggctggtcttgaactcctagggctcaagcaagcttcacactagcctccccaagtgctaggactgcaggcatgagccacccatgactcctcttttcaactaggcatcattcttggatcctgtccttagcctgcttctgtcagtcttggcaaagaatcctgctaaattataccccaatccttaatattttatcaccctggccagccttcagcaagaatccttaagttagcatcttaatccatttgggctactctaacaaaataacatagattgagtggcttaaaagcaacagaaattcatttcccacaattctagtggctgggaagtccaagagcaaggcaccagcgcattcagtgcctgctgagaatctgcttcttggttcatagatgaccattttttcattgtgcccccacatggtggaagggttgagggacctctctgggatctgtttgatagaggcattaatcccattcctgagggctccagtcccataactttatcacctcccaaaggccctgcctccaacaccatcacattgaggattaggtttcaatacatgaatttgggcctggcacagtagctcacgcctgtaatctcagcattttgggaggccacggcaggtggatcacctgaggtcaagagtccaagaccagcctggccaacatggcaaaaacctgtctctactaaaactacaaaaattagctaggcgtggtgacatgggcctgtaattccagctacttgggaggctgaggcaggagaatcacttgaacccggaaagcggaagttgcagtaagctgagaatcatgccactgcactccagcctgggcaacagggcgagactccataaaattaaaaaaaaaaaaaccaaaaacatgaatttgaaggagacacaaacattgtctacaacaatggtttggcaagaatccccctatctgccgagtgcagtggctcatgcctgtaatcccaacactttaggagggaaaagcaggaagattgctggaggccaggagttcaagagcagcctgggcaacatagtaagaccctgtctctattaaaaataaaaaagaatccccctatgcttgatgtttcctcttagtcatttttcacccactaaacccttcactctgctcatcggctgtaaatgccaatctgtctttgctgttttggaaactgagctcatttctctgctgaagtctcttttcccctattacaatagtaccgaataaaactgtctttaccacttttaaccggtgtccagctctgtctcttcgacagcatccagatgagtcacaaagacctgaactaaagcattagcagttaggatccatcaagcatttctttaggatttattgttttaagtcctcagattttgtctaaggcaatgggaatgtagcaagcagtaaacacaacaggcaaaaatccctgccctgggccgggtgaggtggctaacgcctgtagaagtggcagaagttccatgcacccagactgcctcccacctcaagtatcagccacagcaactcatttttctgcctcggagcttttttgcagctattgaaggctgtctgcgtgcagatgctgccagaagttaggaagagataaagccccgaggaggtaacgctcaaccagtgcagagtcaataaatgaatgtgtcactccccaccctcatccgcttgggggactattctgactttttttctgcaccatttacttgcaggagtagctcaataatgcactcttcattggcttttcctcctaacctgtctgcctcttccaatatccctgttactgcttcctgaaaccattttccaaataaactatcagaaaagcaaaatgaagacgcaatcgaagagaacacttggggctgggcgcagtggctcacgcctgtaatcccagcactttgggaggccgaggcaggcagatcacaaggtcaggagttcaagaccagcctggccaacatggtgaaatcccatctctactaaaaatacaaaaattagccaggcatggtggtgcacgcttgtaatcctagctactcaggaggctgaggcaggagaattgcttgaacccaggaggcggaggttgcagtgagccaagatcacaccactgcactccagcctgggggacagggcgaaactccatctcagaaaaaggaaaaaaaaaaaaagagaacacttggaaagaccaggagtggacatgatgtcaaataaaagcagacagcccaagaataacagagtgaaacagaggcggaggaaaaaaagaattgagacttaggggaaagccatttcccatcgttaactactttcagggcaaaaggagaagtaattggagaagtgattggtttagtgatttttctaaaaatagtttctgtgttaattaaaatttacagagaaagcaaatcaatgtgttcccctttatctctgcctaatttctgtcctcccaactcatgagtggggctattgaagacattaaagagaacaaagttgctaaggacatgaaaacccatgggaaaacatccttacatgagtgaatgcctagagagccagccagtcccacctgtatccattctaaggcaaagactaaacatacaatttatcctctaaaaaaatccaggtgggatcaggtgtggtggctcacgcctgtaatcccaacactttgggagaccaaggtggggaggattacttgaggccaggagttcaaggccagcctgggcagcatagcaagacctcatctctacaaaaaataaaaataattagccggacatggtggtacacacctgaagtcccggctgttcgggaggctgaggcagaagaattgcttgaacccgggaggtggaggttgcagtgagccgagattgtgccactgcacttccagcctgggcaacagagcaaaactctgtctcaaaaataaataaataaaaggctcctcttgaggcaacgcctaaaacctagatgtaatgacggagctcttgtgccctcccgtgggcatcatgcctcagatcgggagagcagctctaagcgctctctggggagaagcttgtcagacacaagcatgcatctgtcaatggaattccaggcaccgaggccaacattagcatgcaagcgaaatgctgaaggatgttatgctaaatgcaaaagccaggcacagaaagaccaattccacatgctctcactcctctatgagatctaaaaaagttgaactcaaagatgcagagagaagaatgatgattaccaggggctgaatggggagtggtgggaagtggagagatttttgtctaagagtgtaagttgcagttagacaggaggaatactttttttctttctgcaagttatggtgtacatgagaaatgttttacatgtatataatgcatagtgattaaatcagggtatttagggtatccatcacctaagtctctcactgtcatgcaggctggagtgcagtggtgcgatctgggctcactgcaacctccgcctcccaggttcaagcaattctaatgcctcagcctcccaagtagctgggactacaagcacgtgccaccacacctggctaatttttgtatttttactcgtgacaggtatttttagtagcgacagggtttcaccatgttggccgggctggtttccaactcctgacctcaagtgatccgcccctccggcctcccaaagtgctggggttacaggcgtgagccaccgtgtctggctgagaaggaatactttttttatttgtgcaaattatggtgtactgagacattttttatgtgtatataatgcatagtgattaaatcagggtatttagggtatccagggtatctgtcacctaagtacaatacatttttttaagtatagtcattctactctgctatcaaacatggaatatggccgggcaccgtggatcgtgcctgtaaccatagcaggcaaggattactttgcctttcacctttgggaagccaaagcataaaaattacttgagtccaggagttcgagaccagcctagacaacacagccgacaaccttttttatttttttgagacggagtctcactctgtcgcccaggctggagtgcggtggcactatctcagctcactgcagcctccgcctcccaagttcaagcaattccccagcctcagcctcctgagtagttgagattacaggcatgtaccaccacacccagctaatttttgtatttttggtacagatagggtttcaccatgttggccaggctggtctcgaactcctgacctcaggtgatccacccgcctcggcctcccaaagtgctaggattacagacgtgagccaccacgcccagccttcttttttccctcttctatcaaatgaaactaccttaagtgcaagggcaagtgattccatcctggtagccttaccatctggtctaatgcctgacacaaaataaatgaccatccatgaacaaatcgatgagcgattcaattaattgtttacccagctcaggcctaaatgggaagaggaggaaagcaaagtagaataatatgagggcacagcaaaggatgcccctacaaaaccatgcgtagaacacctccccagaaacccccatactataggggttctggctatggccttcaacacaagtttaccaacaacaggtttcctttggggataatgaaaatattctgaaactaaatagaggtggttagccgcctgtgatctcagctacttgggaggccaaggcgggaggatcactggagcccaagaatttgagatcagcctaggcaccatagtgagaacttgtctcattttgtgtgtgtgtgtgtggttttttgtttttaaatgttgtggcggttgcataacattgcaaatgtactgccactgaactgttctttttaaactttttctttttttttgagatggagttttgctcttcttgcccagtcctgcctcagcctcccaagtagctgggattacaggcacccgccactacgcccagctaattttttgtatttttagtagagacagggtttcaccatattggccaggctggtctcgaactcctgacctcaggtgatccgcccacctcagcctcccacagtgctgagattacaggcgtgagccaccgcgcccaacctaaaacttaattttatgttttgtgaatttcagttcaactttgtttgtttattgagacagagtctctctctgtcacccaggctggagtgcagtagcatgatctcggctcacaacagcctcaaactcctgggcccaagccatcctcccacctcagcctcccgagcagccaggattacaggcacgcacctccactcccagctaatattttgtatttttttgtagagacgaggtctcactgtgttttccaggctggtatcgaactcctagtctcaggtgatcctaccgccttggcctcccaaagtgttgaaattacagaaaacagccaccctgcctggctcaatttaaaaaagaaaaaaactgatatacaaatttgaaaagttttgctaaaaaggaaaaacaaaggctccctctggctgcagtgtggagaatagactgccccatgaggcgaagtggattgtgatggtcatgaggaagctggagggtgtacctcagttctcgaacttcagttattatactttccttagttctatgacttatgaaatatttctcagccgggcgtggtggctcaagcctgtaatcccagcactttgggaggccgaggcaggtggatcatgaggtcaggagttcgagactatcctggccaacatggtgaaaccccatctctactaaaaatacaaaaattagctgggcatggtggcacacacctatagtcccagctactcgggaggctgaggcaggggaatcgcttgaacctgggagggggaggttgcagtgagccgagatcacgccactgcaccccagcctggcaacagagctagactctgtctcaaaaaaaaaaaaaaaagaaatatttctctcctttttttgagaaaagatctcactctgccacccaggctggagtgcagtggtgcaatcatagttcactgcagcctctacctcccaggctcaagtgatcctcctgcctcagcctcccaagttgctgggaccacagttgtgtgccctcacgcctggctaatttttttttttttttcagagacagggtttcgctatgttgcccaggctggtctcatacgcctgggctcgagcgatcctccccccttggcctcccaaagtgttgagattacaggcatgagccaccctgccctgtcctatttatgaaatatttcttgagggacatagaatatttggtctcagtgccagcaggcctgctgaatttcccgagtcttgggaaatgccaagaaataaaggtactatcaccaggcaagctggagtggtgagcgacttgatagtctcagaatgatatcgccagctgttggaaatcttgtagaactggctaacacccactgaacagttgctacgtaccaagcactgcattaatgcacttaatcctgacaatagccctgtgggctgatgggccagggttttgtttttgttcttgttgttgttttgagatggagtctcgctctctcacccaggctggagtgcaacggtgtgatctcagctcactgcagcctccacctcccaggttcaagcaattctccttcttcagtctctggagtagctgggattacaggcatgcactaccacccccggctaatttttgtatttttagtagaaatggggtttcaccatgttgaccaggctggtctcgaactcctgacctcaggtgatccgcccgccttggcctcccaaagtgctgggatgacaggcgtgagccaccgtgcccggcctaatgggctgttttatcaccgcctcactgtagcagtccctctggtgccgcaagtcccctctctgcatctgcaggagacagttccctgtgagacctgacttacttgtcccacctcaagcctggaccacacatcttttggctttcttcagccttctccaacccctcaaggcagcccaaaagtttggggctaaagaccccagggtgagctggacatggtagcccatgactgtaatcccagcattttaggaggctgaggtgggaggatcacttgagcccaggggttcaagaccagcctgggtaacatagggagaccttgtctctactaaaaataaaaatttttaaaaagtcaggcgtggtagcatgcacctgtagtcccagctactcaggggccgaggtggaagatcaaggctggagtgagctatgatcacaccactgcatttcaccctgtacaacagagtgagaccctgtctctaaaaaagaaaaaagacttcaggctgtaattgatcacagtgaacatcagcacatcgtatcacatgtcccctaataggctatactcaaaaggacgcatcatttctgtggaattcctgccagaaatgcataacctcataggcagagtagtcaaattcacagtgacaaaaaggtgctttccagggactgcgaggaagcagggaataggaaattattgctcaatgggtacagagtttcagcttggaaagatgcaaacatcctggagaaggatagcggtgctggttacacaacaatgtgatgtacttagtatcactgaactgttcacttacaaattgttaagatgggctggaggcgatggttcatgcctgtaatcccagtgctctaggaggccaagactttttgaggacaggagtttgagaccgccatgggcaaccccatctcccaatagcgagaccccatctccaaaaaaaattaagatggtacattttatattgtgtatattttgccacagttagaaagagaaagaattgtttggccaggtgtggtggctcatacctgtaatcccagcactttgggaggccaaggcaggcagatcacctgaggtcaagagatcgagaccatcctggctaacacggtgaaaccccgtctctactaaagatacaaaaaattagtcgggtgtggtgccgtgtgcctgttgtcccagctactcgggaggctgaggcaggagaatcgcttgaacccaggaggcagaggttgcagtgagccgagatcatgccactgcactccagcctgggcaacagagcgagactctgcctcaagaaaaaaaaaaaaatagccaggcatggtggcatatgcctgtaatcccagctactacggaggctgaggcatgagaattccttgaacccagaaggcggaggttgcagtgagccaagacctaagacaatcccatgtaacaaatgaggagatgaggccctgtattagtccattctcacattgctataaagaaatacttaagactaggtaatttataaagaaaaaaggtttcactggctcttttacctgcggtacagccatggttccatagcccgtacagggagcatgatgctggcatctgctcggcttctaggaaggcctcaggaaacttagaatcatggcagaaggggaaggggaagcaggtacgtcttacatggacagagaagaagagagaatgaggcaggaggtgctacacacttccaaacagccagatctcatgataacccacacactatgtagcactggaaggatggtactaaaccatgagactgccacccccatgatctgatcacctcccaccaggacccacctccaacactggggactacactctgacataagatttggaggggacacagatccaaactatatcaggaccagagaagttaaggagctctcccaaggtcccacagccaagaaatagcagaggtaaggctccaaccagacaacccagtgtcacactctaccctctcgatcactacactctgccacctctaagagttaagcaatttcccatttaaaatttcactaatttagacccagatttatgtccccataattccctattgtaaacccaaacaacattcttccaccaacttatttgaataacgtgtgtaggacagaaagaagtgacagcttgaaactactctaattttacttacgaataattgaggttgattcatgctgctttctaaaaaactggtaatcctcttggtgttccaggatgccaaatttgtcacgtacgtctcttacaacttctactattctctctcgaaagcagtactcaaaagcagacagtcacaaagatagggtactcaacaaggggtgttccaagacaggagaaagttaactttcccaaaacagatggaaagagccgaaaaggaagaaggaaaatgaaggaggagcttccgggagaaagacacattagtgttcaatgtcacaaagtctattagtagagtataaaaaaaaataatgggccaggcgcagtggctcactactgcaatcccagcaatttgggaggccgaggcgggtggatcacctgaggtcaggagttcgagaccagcctgaccgacatggaggaaccctgtctctactaaaaatacaaaaattagctgggcgtggtggtgggctcctgtaatcccagctactcgggaggctgaggcaggagaatcgcttgaacctgggaggcggaggttgcagtgagccaagatcgcgccattgcactccagcctgggcaacaagagcaaaactccgtctcaaaaaaaataatgataataataaagctggctgggcacggtgtctcacacctgtaatctcagcactttgggagacctaggcaggaggattgcgtgaaaccagttcaagacaagcctgggcaatatggcaagacgcctgtctctacgaaaaaaaatttttcttttaactacccaggcatgctggtgcgtgcctgtggtcccagctatttgggaagctgaggcaggaggatcgcttgagcccaggaggttgaggccgcagtgatccatgatcgtgccactgcactccagtccgggtaactgaggagtaagaccctgtctcaaaaaaaaaagaaaaaactaacctaaactaaactaaagagaccctaaaagggagcagtttagagaacatccaagcttgaatctttctcaggtaactaccttgaggtaagtgatactaaagggcatgaaagcgtctcttttatttctttttctttgagacagagtcttactctgttgcccacgctggagtgcagtggcacaatctcgcctcattgcaacctctgcctcccgggttcaagtgattctactgcctcagcctcccgagtagctgggattacaggtgcccgccaccatgcccagctaatttttgtatttttagtaaagatggggtttcaacatgttggccaggctggtctcgaactcctgacctcaggtgatccacccgccttggcctcccacactgctgagattacaggcatgagccaccgtgcccggccaagagcgtctttgtgttgggtcacttgggatgtagcttcttgctatttcttgttctaccaaggttttcattgccgagggctgccataacagtgtcaccaactgggtggcttaacacaacagaaatgtattcttttacagttctggtagctagaagtcagaaatcaaggtgtcagcagggccacactccctctgcaggctctttcttgcctcttctagcttctggtagcccctggcgttccttggcttatggttgcatcactctaatctctgcttccatcttcacatggccatcttccctttatctctctctgtcatctcctcttactgtaaagtggccactagtcaggctaggcatggtggatggcacctgtaaccccagagctttgggaggccaaggcgggaggatcgcttgaggccaggagttcacgaccagcctgagcaacataaaaaataccccgtctctaccaaaaataaaaaattagccaggtatagtggtgtgcatctgtagtcccagctttttgggaggctgaggcaggaggattactagagcccaggaattagcgacttcagtaagccatgatcatgccactgcactccaacctgggcaacacagggaaaccctgtcgctttaaaaataataataatagggccgggcgcggtggctcacgcctgtaatcccagcactttgggaggccgaggcgggcggatcacgaggtcaggagatcgagaccatcccggctaaaacggtgaaaccccgtctctactaaaaatacaaaaaaattagccgggcgtagtggcgggcgcctgtagtcccagctacttgggaggctgaggcaggagaatggcgtgaacccgggaggcggagcttgcagtgagccgagatcccgccactgcactccagcctgggtgacagagcgagactccgtctcaaaaaaaaaaaaaaaaaaaaaaaaaaaaaataataataataataataatagtaaggccaggtgcggtggctcacgcctgtaatcccagcactttgggaggatgaggcaagcagatcacgaggtcaggagttcgagaccagtctggccaacatagtgaaaccccgtctctattaaaaattacaaaaaaattagccgggcgtggtggtgggcacctgtaaccccagctactcaggaggctgaggcaggaaaattgtgtgaacccgggaggcagaggttgcagtgagccgagatcgcgccattgcactccagcctgggtgacagtgcgagactctgtctccaaacaaacaaataataacaataataataataataataataataataataataataataaataaaagacactagtccaatatttccaaaaacaaacaaacaaaaacactaagctgtggctggacgaggcagctcatgcctgtaatcccagcactttgggaggccaaggcaagaggatcacttgaggagttcaagaccagcctggccaacatggcgaaaccctgtctctactgaaaatacaaaaattagccagacgtggtggcaagtgcctgtaatcccagctactcggaaggctgaggcaggggaaccgcttgaacccaggaagcggaggttgcagtgagccgagatcgcaccattgcactccagcctgggtgacaggacgagactccatctcaaaaaaaaaaactaagctgttatataacagagacccaagaatgtagcagtttcaagaatatccaagaatgaagtcattttggactggggcccaccttaatgacatcatttaacttggtaatatctgcaaatagatttccaaatcaggtctcattcacagacactgagggataagactttgacatatctttgaggggacacaaggtaactcctaacagccatcacctcgagcactgtccccgttgcagggttgatgctgggatggaggaatgtccctgtttctactccatggaggagaaagagcacagagtagcccacacttggtgttagaaggcccgtacccagaaatgccatgcctcatcactgttcatttttcactggacggacggtgccctccatggctacacctggctacaatgaaggctgggacaagtaacccttaactgggccaccatgcaaggtgaaacagcaccactgctatgcaagcaaaagaaagcaaactttggtctgggcacggtggctcacgcctataatcccagcactttgggaggtcgaggagggcggttcacgaggtcagtagttcgaacccagcctgatcaacatggagaaaccccatatctactaaaaatacaaagggcgtggtggcatgcatctgtaatcccagctactcgggaggctaaggcaggagaatcacttgaacccaggaggcagaggttgcagtgagctgagatcgctccattgccattgcactccagcctgggcaacaagagtgaaactccgtctgaaaaaaaagaaaaaagaaagaaagcaaattgtacgatgccagcttcccctaatctgagcgtcttacataaccatgccacatttgtcaaaactatgatattaacattggtacaatactattaagtagacttcattcaatatcactgtcttttttggccaggcccggtggctcacgcctgtaatcccaacactttgggaggccgaggcaggcagatcacttgaggtcagttcaagaccagcctggccaacacggtgaaaccccatctctattaaaaatacaaaaattagctgggcatggtggcacaagcctttaatcccagctactctggaggctgaggcaggggaatcgcttgaacccaggaggtggaggttgcagtgagccaagatcatgccattgcactccagtctgggtgacagagcacgactctatcttgggaaaaaaataataataaattttttttaaataaaattaagggcagggagtggtggctcacgcctgtaatcccaacactttgggaggccaaggcaggtggaccatgaggtcaggagttcgagaccagcctggccaatatggtgaaacctcgtctctgctaaaaatacaaaaattagccgggcatggtggcatgcacctgtagtcccagctactcaggaggctgaggcagaagaatcgcttgaacccggaaggcggaggttgcagtcagctgagatcgtgccactgcactccagcctgggcgacagagcgagactccatctcaaaaagaaaaataaataaataataataacaataataataaaataaattaaattaagtctcttgctcacaagaggataaatgataggcatggtttcaacatgcttttctaatagcaatgagatgggacatttcaactctttagacacttttccccttggctgtatatttttgtgccacttcctggaattaagagcatattgtgggccaggcttagtggcgcacgcctgtaatcccagctactcgggaggctgaggtacaagaatcacttgaacctgggaagaggaggttgcagcgagccgagatcacaccactgcactccacagcctgggagacaaagtgagatcagtctcaaaacaaacaaacaaacaaacaaacaaacaaacaaaaaaacgttaaaatgaaggctatagtttagattcatcccccccacccaaggccaaccacccataaccacacaaagtttgtcatcttgattcccctgaaatgctagctctaatcataaatgaaacatgaaaatgtaagttttacatccttgtcagcatgattcagtgaaattaaaccaatcggctgtagacaaatgagcttaaacgggtctatttgccttaaaaagaagttaatgtaaaacagccaatcacaaaaaagctcaaaatacttcctcctttatgccttataaacttgccctaactgctgtaagagaacttcttaccacttgatttgacatctcctgaatcaagacttgctgtatgacaaagaacttttaatttttttctaactgtatctgattttatatatgtatgtatgtatgtgtgtgtgtgtgtgtgtgtgtgtgtgtgtgtatatatttgttttgttttgttttgttttagacagtcttggcctatcattgagctggagtgcagtggcatgatctcggctcactgcaacctctgcctcctgggttcaagtgattctcaagcctcagcctcccgagtatctgggattacaggtgcccactaccatgctgggctaatttttgtatttttggtagagatgggcgttcactatgtttgccaggctggtctcaaactcctgacctcaggtgatccacccgcctcggcctcccagagagctgggattacaggcgtgagccaccgcgccaggcctgattatatttttgacactaaaagtatcgtatgcaggaagacagctggcacacacggaaacttcatgcaaatagaatgaagtatgctctctaaaagacaaattagaagaaggtgccctatcctccaacttggagaacacagcctaggccggacttcagccccattctcatgccctcggccaggcacacttgttcagggcacaacctgcacaatcgtacacagtggccctgactatgtctgtatgcaactacaaaaacaataggccggacgcggtggttcacgcctgtaatcccagcactttgggaagccgaggtgggcagatcacaagatcaggagtcccagaacagcctggccaatatggtgaaaccccgtctctactaaaagtacaaaaattagccgggcatggtggcgggcccttgaagtcccagctactcgggaggctgaagcaggagaattgcttgaacccgggaggcagaggttgcagtgagccgagatcgcaccactgcactccagcctaggcgacagagcaagattcagtctcaaaaaaaaaagtgaagagaaaagaggatccggtatccaaatgtgttttatataaaatgaatcgttttcagtgcactgaggaagttttctatttaaagaaatcctgctgtgaactcttttgtgaagaatgctttcctaatggaattagtcaccactgagtcatttctgcaaacttcaggtttgcggttttgcctaagcaagatctggccggagaagtgagataaattatagatgtcgctaataaattacagattactcaaaggcaaaagaggaaagaaaaaaaaaaattgactcgtgtatatgaaccgaattgagtcaggggtctccaccggcgcttaatcatggccgagatcctcctgcttctgcctgtcctttggtagacacacgctacaagtcagcttctgtccatcgaggaagggaacgaactaacaacaaagaacaattaagagaaggttggccccgtgaaaacaagggaccattgaagagcgagtaaaggcttggccacgttctggccccgccccaccccggtcgccctgacaacagcgccggcgtctgggctgagcttcggactcgcagccagcctcccacaggccaccgcgcgcgctcacttgcgcatgcgcctcggagctggcttcaaccagcgaaggctgaacccgcttccagggtcctcgccgagctgggagttaggatccgagggggccaagagggataagaaaacttctctgggtgcccacgtggtactgagcgcccttgggagggctctggagaagaccatcgccttccagggtagctccctccctcaaaggtttgagatcatggtccagttctcgggtctcccagcctcagtttccccatttgtaggaaaggcgttcacagcctctatctcagaggaggctttgaggattcagagagctcagaagagggtaggctttgtggtgagcgctgggtaggacttcggggtgggagtggtgggctgaagagtccccgacaacagcccgaggaagtattattattgttcttattttacagggaaggaaactgaggtccagaaaagttatgactcgccccaaggggattgcctggcaggacgtgaaggggaagaggcccaccctggagtaaccctcactggagaatccagaggtgagatgagccttgtacctatctcagcagagggagtaggataatatttaaatattaagggtggggagaaggaatgaaggcaagaaataaaatgcccaaaatgccccaaacgccatccggaccataaaagtgatggcgatagtgttggacttaggagctcaaagatgctaaccttgacaggcctggtggcccaagtctgtagtctcagctacttggaaggctgaggcaggaggatcgctttagcccaggagtgccaatccctcctgggcaacatagtgagatccttgtttccttaaaaaaaaaaaaaaagtgcatactttctttctttttttttttttttttgcgacagagtctcactctgttgcccaggctggagtacagtggcacgatctcggctcactgcaacctctgccttcccggtccaagcagctctcctgccttagcctcccagtagctgggactacaggcatgcaccaccacactcagctaatttctgtatttttagtagagaccgggtttcaccgtgttggccagactggtctcaaactcctgacctcaagtgatccacctgcctcttcctcccaaagtgctgggattacaggcatgagcaactgcacccggcataaaaaatgcataccttttgaaattttttttttttttttgagacggggtcttgctctgtcacccaggctggagtgcagtggcgcgatctcggctcactgcaagctctgcctcccaggttcacgccattctcctgcctcagcctcccgagtagctgggactacaggtgcccgccacctcacccggctaattttttgtatatttagtagagacggggtttcatggtgttagccaggatagtctcgatctcctgacctcgtgatccacctgtctcggcctcccaaagtgctgggattacaggcatgagccaccacgcccggccttgctggaaaattcttaagcccacctggcatctccatcttagtcaaacggcccaccaacttcctgttcaaactgagctattttgatttctgagtttgttaaccttggcactactggcattcggggccggatcattctttgtagtgcaaaggctgtcctgtgcactgtgagaagttgagcagcatatccagcctctgctcattagacgccatagccaggcacggtggctgacgcctgtaatcccagcactttgggaggccgaggtgggtagatcacctgaggtcaggagttcaagaccagtctgaccaacatggagaaaccctgtctctactaaaaatacaaaattagctgggcgtggtggcacatgcctctaatcccagctactcgggaggctgaagcaggagaatcgcatgaacccagaaggtggaggttgtagtgagccgagatcatgccattgcactccaacctgggcaacgagagtgaaactccatctcaaaaaaacaaaaaacgaacattagacgccatgaacactccctcccaacccaatttgtcacaaccaaaaatgtctgcagacattgcccctgaaggggtgaagatggctcctattgagaaacactggccatgagccaagaattaaaagagagaaatctgttagttttcactaaatagatttgaattctttattttattttattgtttttgtttcattttattttgagaggcaggatctcactctgtcccccaggctggagtacagtggtgcaatcatgactcactgtagcctccaactcctgagctcaagggatcctcccacttcagcctccctagtagctgggactataggcatgcaccaccctgcttggctaatttttgtatcttttgtagagacagggtctcactatgttgcccaggctagtctcaaactcttggcctcaagagaccctctcacctcagtttcccaaattgttgagattacaggcgtgagccagcacgcctggtcttgaattctttaaccattgtcctctaccagaaagtatacactatattaattctctcactgtagagattgtttttttttttttgagatggagtctcgttctgtcacccagactggagtgcaatggcacgatcttcactcactgcaacctctgccaccgggttcaagtgattctcctgcctcaccctcccaagtagctgggattacagggacacaccaccacgtctggctatttttgtatttttagtagagacagagtttcaccatgttggccaggctggtcttgaactcctggcctcaagtgatccgcccgcctcggcctcccgaagtgctgggattacaggcgtgagccaccgcgcccggccctttttttgtttgttttaagacaggttctcactctaccacccagcctggagtgcagtgctgcaaacatagctcactgcagcctcaacctcctgggctcaaagggtcctctcacctcagcctcccaggtagctgggattacaggtgtgctccaccatgcacagctaattggtttttggttttagttttggttctgttttgtagaagtgaggcctcactttgttgcccaggctggtctcaaactccctggggctcaagtgatcctcccacctcagcctcccaaagtgctgggatgggcacaagcttctgcacctggctaagattcttaaaatagccagattttctggaaactggttgacccagttggattatatgaaacacaatggatgattgtaatcaacagttcaactgagtggaactagccctggccaaggatcaggagatcttagcagggcacagcggctcatgcctgtaatccagcactttgggaagcctaggcgggtggatcacctgaggtcaggagttcaagaccagcctggccaacatggtgaaaccccatctctactaaaaatacaaaaaattagtcgggcatggtggtgggcacctgtagtctcagctgctcccagctgaggcaggagaatcgcttgaacctgggaggcagaggttgcagtgagccgagattgcgccaccgcactccagcctggaagacagagcgagactctgtctcaagaaatcaggagacttgagtctgttgccagttctaccattacaagctctgtgacattatcacttaacttttccctggacttgttttcccctctgtcaaatgaggatgttgaggtgatttctaaggacttacaaacacccagattctgacaggatgctccctccccgtcccccaccagaagttattgaagccgcccagccaccccagtgtctgtgttttttttttttttctccagcccccagcccagtcccctaaacacatcttttggagtcagctcttccaagctgttgttaccactcagacaaactcattattattcctgatgctaatgggtaaattacggtggtggttaacacagcagtggcaggggctcctttgtgggaaattatggtgtttaagcacaagacaccctggggtttgcctgaggaaaaataaaatttaaaactggcctcttgcggccgggtgcggtggctcacgcctgtaatcccagcactttgggaagccaaggcgggcggatcacgaggtcaggagatcgaggccatcctggctaacacggtgaaaccccatctctactaaaaatacagaaaattagccgggcgtggtggggggcacctgtagtcccagctactcgggaggctgaggcaggagaatggcatgaacctgggaggcagagcttgcagtgagccgagatcgcgccactacactccagcctgggtgacagagggagactccgtctcaaaaaaaaaaaaaatggcctcttgctccacgatgtggtgtgtattttaggagtatcccaagtctggaatataggaatatccaagtaaattataggatataccaatatcattagttcttctgacctggctaatatgtatacaaagagccatagctcctccctttaattaattctctagagcatccacctgcttttctttctttcttttttttttttttttttttttgtgacggagtttgactctgtcgctcaggctggagtgcagtggcacaatctcggctcactgcagcctccatctcctgggttcaagtgattctcctgcctcaacctcccaagtagctgggattacaggcacctgccactaagcccggctaatttttgtattttttagtagagacagtttttctccatgttggccaggctggtcttgaactctggacctcaaatgatccacctgcctcggcctcccaaagtgctgggattataggcataagccaccgtgcccagcctaattttattttgtacttacccaaatactctaagtacttacccaaagactccctcattcatttattgattcattcattcagtgtatttactgagtgctactacgtagctctaaatgttggagatgcagtgataaacaaaataggcagtctttgccgttttgttttccatttttttaagagacagggtctcggccaggtgcggtagctcacgcctgtcgtcccagcactttgggaagccgaggcaggtggatcacctgaggtcaggagttcgagaccagcctggccaacatggcgaaatcccgtgtctactaaaaatacaaaaattagccaggtggtgggaagctgtgatcctagctactcgggaggctgaggcaggagaatggcttgaacccaggaggcggaggttgcggtgagctgagatcgtgccactgtgctccagcctgagcaacacagcaagactcattctcaaaaaaaaaaaaaaaagaaaaaagagggtctcgctctgtcacccatgctggagtgcagtggcacagtcatagctcactgcagcctcaaactccagggctcaagtgatcttcctgcctcagtctccacgctatctgtgactataagcacatgacaacacccagcctagtttttaaactttttttgtagagcatctcactatgtttcacaggctggtcttgaacccctgggctcaagggatcctcccactgcagcctcccaaaaatgctgggattacaggcatgatccactgtgcctggccacttctttgctctcttcagcttttgttctagtgtcttcagtttggatgatactggtcagaccattttctaggagcaggatcccaattcttcaagttcctgctcttcctgggtagttcatagaatcttctggccctttgtcctaatccaacaactgcagagtacatagaaaagcaggtagggctgggcgcggtggctcacacctgtaatcccagcaccttgggaggccgaggcaggtggatcacgaggtcaggagttcaagaccagcctgaccaacatggcaaaatcccgtctctactaaaaatacaaaaattagccaggcatggcggcgagcgcctgtaatcccagctactcaggaggctgaggcaggggaatcgctggaacctgggaggtggaggttgcagtgagctgagatcatgccactgcactccagcctgagcgacagagcaagactccatctcaaaaaataaataaataaatttaagttagccagatgtagctggttagtctcctattggacagttctagaccatactccatgcccttgggaaataatataaatgagacagttttccaaaggtaaataagcttcaggaatgccaacaaagtgctgctagctctttgtatggatgaatctatcagaatgatcactcttctggccttccctgcttcgaaacaggccatctgccccttggtgttgagtatcccagtagccattgggttctagaccaagctggacacagtgattcttgtgattcaaatgtttctcctcaactgaaaaagctcagggtgtcttttggactgtccctcaaaacctagctttccactaattagtgaagcatgacttttccatgccatgtctgttctgggaagtttcctcttcatcgtggccttgggccccagggaaatttcagtggatgagcagaagaagtggaaaaggggatgaaaagtcaggtggaatgacatcatccatcattatggcatcatcacagctcttacatcattgtcatcatagattgtcactgttatggattgattttcttctgattcttggtatccatttcttcacatgtgtttaaaactcttttgactgactgcttacctaacagaagtttcttgtgttgagttcctttgccagataaaaacaaaataaggctgggtacagtggctcacacctgtaatcctagcactttagaaggccaaggcgggcggatcacttgagatcaggagttcaaaaccagcctggccaacacggtgaaaccccgtctctattaaaaatacaaaaaagccgggcgtggtggctcacgcctgtaatcccagcactttgggaggccgaggcgggcagatcacgaggtcaggagatcgagactatcctggctaacacggtgaaaccccgtctctactaaaaatacaaaaattagccgggcatggtggtgggtgcctatagtcccagctactcgggaggctgaggcaggagaatggtgtgaacccgggaggcggagcttgcagtgagccgagatcgagccactactgcactccagcctggatgacagagcaagactctgtctcaaaaaaaaaaaaaaaaaaaaaattagctgtgcatggtggtgggcacctgtaatcccagctacttgggaggctgagacaggagaattggttgaacccgggagacagaggtggcagtgagccgagattgcaccactgcactccagcctaggtgacagagcaagactccatctctaaataaataaataaacaaacaaacaaatggatttatggttatttatataaatcagttgcactcaaatacatatagccctccattgtctttaacctttttaagagacagggtctctctgtcacccatactgaagtaccatggtgcgatcacagctcactgcagcctcaaacacctgggctcaagcaatcctcctgcctcagcctcccgagtagctgggactacaggtacatgccaccacacccagctgacatattttcattttaacttttttatagagacagggtctccttgtgttgcctaagttcattgtcttactagtgcattctttaatatgttttgatatttgacctctaagagagctgtatacattcacattagctggaaactctaattctttattccttcaactctactctatggatttggaagctctagctatggcaaacactccctcggtttgttaaaatgtgtggttgtggttggaacccacctccctgatactggcaccactggccttattcctgcctttgtgggccacagagatccaacccctcttcccacataccaggcctccagctccttctcctctctaggaacccaaagtttgagtctagtcctggcttctttatccttccagtcaccaattagagctcagaaagcaggtcaaataagttagaattttttttttaagttctgggatacatgtgcagaacgtgcaggtttgttacacagctatatatgtgctgtggtggtttgctgcacctatcaatccatcatctaggttttaagccccacatgcattacgtatttgtcctaatgctcttcctccccttggcccccattccctgacaggccccagtgtgtgatgttcccctccctgtgtccacgcgttctcattgttcaactcccacttatgagtgagaacatgcggtgtttggtttctgtatgtttactgcattactatttacaatagcaaagacttggaaccaacccaaatgcccaccaatgctatcactggattaagaaaatgtggcacatatataccatggactaccatgcagccataaaaaattgagttcatgtcctttgcagggacatgcatgaaactggaagccatcactctcagcaaactaacataagttagaaattttaatttatttttgtttgagacagaatcttgctctgtcacccaggccgagtacagtgatgagatcatggctcactgcagcctccaccttctaagctcaagcaatctttccacctcagcctcttgagtagcttggactacaggcacgtgccactatgcctggctaattttttgttttttgtagagacaggggtctcaccatgttgccgaggctggtcttgacctcctggcctcaagtgatcctcccgcttttgcctctcaaagcactggggttacaggcatgaaccaccatgcccagccagttagacgttttttgtttttttgtttgtttgtttgttttttatgtgatggagtctcgctctgtcacccaggctagagtgtagtggcgcaatcttggctcactgcaacctctgcctccgagttcaagcaattctcctgcctcagcctcccgaatagctgggattacatgcgtgcgccaccacgcccggctaatctttgtatttttagtggagatggggtttcaccatattggtcaggctggtcttgaactcctgacctcgcgatctgcctcccttgggctcccaaagtgctgggattacaggcgtgagccaccgtgcccggccttagacatttttatatttggtttgtggctgtgatcaaagccatttgggatgtctgcccagccctaccctcttcatatgagcacatccaaccctcaattgcagccctgcgcatagggttcagctaagccacacccagattcctgacccaaagaaacagtgagataataaatgttttaggcctctatactttggggtaatttgttacgcaaccagagataagtaatatattgtcaaaaccaggtaggctttaattagtctttccagatgtctgtttctttctttgtgctggctggaggcctttggcttttatagatttcttttttttttttttttttttgagacggagtttcgctcttgttgcccaagctgcagtgcaatggcgtgatctcagctcactgcaacctctgcctcctgggttcaagtgattctcctgcctcagcctcctgagtagctgggattacaggtgcacgccaccatgcctggctaatttttgtatttttagtagagatggggtttcaccgtgttggtcaggctgatctcaaacccctgacctcatgatcggcccacctcagcctcccgaagtgctgggattacaggtgtgagccaccatgcctggccagaaatttttttttaagagatggggtctttctttgatgcccaggctggagtggtgggaggatgacttgagcacaggagcccaagagtagcctgggcaacacaggaagacctcgtttctacaaattaaaaaaaaaaaaaaaaattagctaggcatggtgcctgtggtcccaactactcaaaaagctgaggtgtgaggacggcttgaacctgggagttcaaggctgcagtgattgcaccactgcacttcagcctgggtgacagtggagaccctgtctcaaaccaaaccaaacaaaacaaaacaaaacaaaagaagctattggagggccttataagctgcctcagaaccaaggacttcctaactttctcttgtttctccccatctcccaagcacagggaggggctctctttggaagttcccttatttgactgatgaaaacttcttccaaaagaaatgcagttgtcttaagatgactcctccctaagaatctcatcaaatatccaggaaatattaaccactggcaaagagaaaagactaaaaattggcatcatgtccaaacagacttcatctactcctctctgtgcagcttggagagattacatgggagactttatctacataataagacggcctttgttcacaatgaagttctgccctcacctttctgtcgcctccccaagagctcagaggaactttgtcccaggccactgtctgttcattgggcttcatcagttcccctgaacatcattcatttcccctcaaaactgcctacattccccatttctctctcccctaggaagacagtatttaactcacaaccatctggtccttctttgagtcccacttttttttttttttttttttttttttttgagacggagtctcactgtcgccagcgctggagtgcagtggcgcaatctcggctcactgcaacctccgcctcccgggttcaagcgattctcctgcctcagcctcccaagtagctggcattacaagtctcacattttatatggctcccatgcttacgcataaatgtctgtgccctttcttttgttaatctgtctattgtcagctcatttcagtgaaacttcagaacgtgaaagggaagttttccctttgccctatgccttcctttccctgtatcaattcctttggccccaccagaactggcctgcatttggtatctttatagaacagcctctttgtatcccaggctgatgttcaggctccatcacttgccctgtgcattaagtagtaacagtgagactctacaagccaaggcttctcattctcccctctctaggaagtcctgctcccaagatgacattctgtgccttttcagtcactaactcttggttcaggtacaagacaagggctcaagcaaaatccagatggactgagtgagattattggggtgaaatgcagttccctctcattcctggggatcagcgagcatgcctccctacagcacaccccccacctgactcattctgcctcatccaggtcagaggtccctccttacaggagttcttacagaaaccaactgaggtctgcttacccagcacagtaaaaccagatacccacactaaggtctttgcagtgatagaaagaaaggtgtttattgcagggcaccatgcaaggagaatcagggcagctcatgcttaagacctgaaatcaccaatggcttgcaggtgggggttttttaaggcaggtgtaaatttcagtaaaccagaagctacaagcaaaatcataaatcaatgcatggagattacacattggtttccacttaaaaaggcaggatatcttaaagtgggggcttacaggtcgtagatagatttaaacatctaggcagggcacggtggctcacgcctgtaatcctaatactttgggaggccaagatgggaggattacctgaggtcaggagttcgagaccagcctcgccaacatgacgaagccctgtctctactaaaaatacaaacattagccggatgtggtggcacatgcctgtgatccttgctactcgggaggctgaggcaggagaatcgcttgaacctgggaagttgaggttgcagtgagccgagatcatgccactgtactccagcctgggcgacagcaagactcagtctcaggaaaaaaaaaagaaaaagaaaaaaatagaaagcctgggcgcagtggctcacgcctgtaatcccaacactttgggaggccaagatgggaggattacctgaggtcaggagttcgagaccagcctggccaacatgacgaagccctgtctctactaaaaatacaaaaattagccggatgcggtggcacatgcctgtgatcctcgctactcgggaggctgaggcaggagaatcgcttgaacctgggaggttgaggttgcagtgagccgagaccacgccactgcactccagcctgggcaagactcagtctcaggaaaaaaaagaaaaagaaaaaaataggctgggcgcagtggctcacgcctgtaatcccaacactttgggaggccgaggcgggtggatcacgaagtcaggagttcaagccagcctggccagcatagtgaaacctcgtctctactatagatacaaaaattagctgggcatggtggcaggtgcctgtaatcccagctacttgggaagctgaggcaggagaatcacttgaacccgagaggtgaaggttgcagtgagccgagatcacgccacaggactccagcttgggcaacagagacttagtctcaaaaaaaaaaagaaaagaaaaagatttaaacatcttctgatttgcaatggattaaggaagagaagctttgtttaaaaattttgagtcagtagaaacatgtcaactggttaggggaagtaactttctccaagcccctcaggaggaaacttggaacaaaagggacataaagtttagtcttcacttcccccttatctggggtttccaagactctgaaagacaattcagggacatatgttaagatgttatctttaatttctatagggaaaccaaacatctctgggactctaacttccttagcttttgttttggatcattatgtcttttttgtttaacaagttacttatttacttctcaaggctagctaggggcctggaatttcccttgaaggaactcagaaatttcctttgtttccatgcttggggtctcgtaaaaaaggggatccctgctctgtctcagggtcttactgaccctcactccagcccattctcaaacaccctaccctctttaaaaatttctctggggttaggccgggcgcagtggctcacgcctgtaatcccagcactttgggaggccgagacgggcggatcacgaggtcaggagatggagaccatcttggctaacatggtgaaaccccgtttctactaaaaatacaaaaaattagccgggtgttgtggcgggcgcctgtagtcccagttactcgggaggctgaggcaggagaatggcgtgaacccgggaggcggagcctgcagtgagccgagatcatgccactgcactccagcccaggcaacagagcgagactccgtctcaaaaaaaaaaaaaaagatttttctggggtctcatggtcttttaagtcaaatgcatacaacccaaaacagtatagctcagaggacaagggaacaaggtttagcatgagcagttgtaggtcagctcctccacccctcactaactgtgcgacttaacctctctgggcctgtctcaccatctgtaaaacagaaatgatgaaaagtatctaccttctaggggcattctatgagattatgcatgtgtgagtgagcaccaagcattgctcagtggtgcctagtgggtagtgagcactcagtatgcagcaccatgactatgtaagaattcatttgttagtagagcccggctttagaacagagatggaacctggcaccgaataataaagcatggggaggccgggcgcagtggctcatgcctgtaatcccagcactttgggaggccgaggtgggcagatcacctgaggtcaggaattcaacaccagcctggccaacgtggagaaaccccgtctctactaaaaatactagctgggtgtggtggcgcatgcctgtaatcccagggctgaggcaggagaatcgcttgatcccggaaggaaggtggaggttgcggtgagccaagattgtgcctttgctctccagcctgagcaacaagagcaaaactccatagatagatagatagatagatagatagatagatagatagatagatatagatatatagatatctatagatctatagatatctatatatatatatatagatatatatatatatcaggaggaatagtagtaatattgtcatcacttctcaccctgtctttgataaattgccagttgaagtgtctgcttcatcactgagaaaagagtgtgttctttcctctctgaatccccaggaccagacatatagcaggtgtccaatgaacagctcagctgttgaatgaacaaatagattctgttaggccctacaaggcataaaagtaaattcagtctgggcacagtggctcatgcctgtaatcccagcactttgggaggccaaggcgggcagatcatctgaggtcaggagtttgagaccagcctggccaacatggtgaaaccccatctctactaaaaatacaaatattagccaggcatggtggcgggcacctgtagtcccagctacctgggaggctgaagcaggagactcacttgaacctgggaggcagagggtgtagtgagctgagaccacaccactgcactccagcctgagtgacagtgagactccgactcaaaaaaaaaaaagtaaattcaaaagccattcacctgtgcagaaggcagggccaggctaatctgaaggctctaagagaagtatccacccacttcttctgtaaaaggccagatggtaaatattttagattctttgggctctctcttcctctgtggcaaccactgaattcaaccctgttgcagacatagacaatagataaatgaatgggcccggctgtttgtaggtaggtgaaaaatggcttcccttcacctttataggttctttggctgggctacgaattaaattgacatgtaaacagacagggcaaaagccatatttaattatgtacctatgcaggggagtcccacaaaatacaagactccaaaaaggatcagagaggctgggcccagtggctcatgcctgtaatccaggcactttggaaggccaaggcaggcagatcacctgaggttgggacttccagaccagtctggccaacatggtgaaaccccatctctactaaaaatacaaaaaatagccgggcgtggtggaaggtgcctgtaatcccagctactcgggaggctgaggcaagagaatcacttgaacctgggaggtggagagcgcagtgagctgagatcacgccattgaactccagcctggaccacagagcaagactccctctcaaaaaaaaaaaagtatcaaagaaaagaataggggtttggggcttctgggaggatggtggtaacacaagttatgggagggtaaggggagaaattgtatgatggagaaagtctgtcttgttaagcaaataaaaaagtcttgcaggtaataaaagttgtctcagagcagccctcagaaggatacatgattgggaatggtttcactcttccctagttaataagatcgtaggaaagcattcctctttctgtctttaggcagataagagaaattcagagaaaacctctccttccctgcatttgctgttcccccaagtgcccttattttgaagcaatcagcagacaaaagcgcatatccctgtgttccaatgaaattttatttacgtacgctgaaatttgaatgttttattttcataagtcgtaaaatagtttttcccccacctaactatttaaaaatgcaaaaacagagcagtggttcacgcctgtaatcccagcactttgggaggcaggaggattgcttgggccctggagttcgagactagccggggcaacatagtaagaccttgcctgtgcaaataatttttcttgagacggagtcttgctgttgttgcccaggctggagtgcagtggcgcgatctcggctctttgcaacctctgcctcccgggttcaagcaattcttttgcctcagcctcccaagtagctgggactacaggggcccgccaccacaccctcgctgaccggctgcagcgcgcaggacagcacgcctgggagggcggtgccaggaggcgggcctcggattgggcctcacgtagtgggctggacagaggatggagcctcttggcgtaagcgcggttgggcggggcattcctggattggcccactccggcgtcgcagaacgcttggcgtatcgtccttcagccaatcagcgtggagctgctgcctcgccccgcctcacgccggcgtcctgggggcgcggagagggcgcccaggttcaccgcgctctcagcgcgcacttccgggcacggtcagggcgtgacgtcgggaggagggcaggtaagtgccggcgggcggaggagcggggagggccgggggtccggcagccgcctcaccctggcctcggagctgcccggcgcgcccttccgcgtcgggggacgcggagctgaggacccgatttagatgcccggagccggcccaggtcccagccaggaccaaagtccctgaggccccagctgagacctctgacccaagtgcccgggacccggtcccatcctagcccggatccatattatgcctgaagggtcctgggtttttgcatcgggaaaatgggaccaataagtccctatctcaccagattttataaaaatgattcttgtaaaaccgtgagcagcagaaatgactaaactgccaaacgtttaactcggcgtcaggcgctgccctgaatgccttaaccagccatttttacacataaggaaaatgaggcttagagagagaaaacaatttgccccaagtcaagcagataggaagcagcagggtggagctccgagcccaagccgtaagcccaggacaaacagggtcggtaattacttttgcaccaaggaccggagatatctacacgcccacccgatagccccgtctgccatttactggggtaacaaaaccatcttaagacacacacacaccctcgagctcctgtaaacggagtatttgctctttgcaggctcttcccgtgggttagttgattcacagcatccccagaaagtcagtcttgtcgtcgtcattcgccctttaccggtgacgaaatacaagcccagggaagcgcagtcactgaccaaggtcacccagctgatgaggagtggagctgggattcaagcccagggagccgtgtcccctaacgcctcaaggggcacttagctattttgttggcaaaagtatttttaggttggaagggaccttggaataatccaatctaaaggacacactttatagttggaggatacaagactaaggtgagggtagaacagtttatatccgggactttgcaccactgcctcaccacctcactacaccactcccactccatcagaagctcttccatcagcttctttctttctttttgttggagacagaatctcactcttgtcaccttggatggagtgcagtggcgtgatctcggttcactgcaacctccgcctcccagattcaagcgattctcctgcctcagcctctccagtagctgggattacaggcgtacgccaccaggcctggccaatttttgtatttttagtagagacagggtttcaccatgttggccaggccggtcttgaactcctgacctcaagtgatccacctgcctcagcctcccaaagtgctgggattacaggcgtgagccaccgagtccggcccccaagaatggttttaaattttctagtagttggggaaaaatcaaaagaataatactttgtgacatgacgattatgtgaaattcaaatttctgtgtccatcaataaaatttatattggcatgcagctacgcccgttcatttatatattgtttgggactgatttctagctatgaaagcagagttgagttgttggggcagagataatctggcctaaaaagctagaaatacttattttctggcccttgacagagaaactttgccaatctctgttctagaatacccttcactgcttcacagagtctctctttagtgtaaactagaacttctttcttttttttttttttttttgagatggagtctcgctctatcgcccaggctggagtgtggtggcgcaatctttgctcactgcaagctccgcctcccgggttcacgccattctcctgcctcagcctcccgagtagctgggactacaggcacccgccaccacgcccagctaattttttgtattttttagtagagacggggtttcactgtgtttgccaggatggtctcgatctcctgacctcatgatccacccgcctcggcctcccaaagtgctgggattacaggcgtgaagaacttccttctatatgacctaaaagcctcccttccaaacatgagagggggtctcaccacccctagtttgaggagcccctgcatttcccacctgtgtcacctgcactgactgtgacccttatggagcctcattcagttatctcagttgtttacccagttgacatttatctgggcctggcactgtcctaggtgttagggatatggcacagtgtgacctgccgggggagacataaaccgacacagggtgatatgatcagaattccaggaaacaagtgactatggattggatggttagatgagttcattggttttttttgtttgtttgtttgagacggagtctcactttgtagcctaggctggggtgcagtggcgccatcttggcttactgcaacctccgcctcccggtttgagccattctcctgcctcagtttcccgagtagctgggattacaggcatgcaccatcacactcggctaatttttgtatttttagtagagatggggtttcaccatgttggccaggctggtcttgaactcctgacctcaggggatccacctgcttcagcctcccaaactgctgggattacaggtgtgagccaccgcacctggccggatgaggtctttgatggatatgatatgtaggtcaagacctgtgacagggggctgggtgcagtggcttgtgcctgtgatcccagcactttgggaggccctaggtgtgtggatcacctcaggccaggagttccagactggcctggtcaacacagtgaaaccctgtctctactaaaaatacaaaaaaattagccaggcttggtggcgggtacctgtaatcccagctactcaggagactgaggcatgacatcacttaaacccaggaggcagagatagtgagccaagatcatgccaccccactccagcctgggtgatagagtgagactccgtctcaaaaaaaaaaaaaaaaaaaaaaagcctgtaacaaagagcttgcaaacctgaggaacagcaggtgcaggccagctgcacttggcctttgaagacagccaggaagccagtgtggctggaacagagtgaacgagagatagaggggtaagagttaggcttggagaggcaggcaggggccccacaggccgtgggaaggggtttgacttgattctaaaaaccatatgaatcatgggaggggtttaagcaggagagtgacacgtttgttcatattaaaagatcccagctgggcatggtggctcacacctgtaatgccagcactttgggaggttggggcgggtggatcatgaggtaaagagatcaagaccatcctgggcaacatggtgaaaccctgtctctattaaaaatacaaaattagctgggtgtggtggcgcacgcttgtagtcccagctactcgggagactgaggcaggagaatcacttgaacccaggaggtggaggttgcagtgagcagagatcgcgccactgcactccagcctggtgacagagcgagactccatctcaaaaaacaaaaagatcccctgggcagctgtggggtgagcaagtgtcaagggcagagtcgggagagagaagaccgtgctggcccacgtgagtgatgatgggtgctggacccggtgggggccacagagggatgaaagtgtcagatgtgatgcgtatattggctgtagagtggacgggactctctctttctaaacagacacgccgctttttggatgcctcctatgcctggcgggagtcttgtctgagctggcaccaccacacggcccacgacatcttcgcagggaagcctgtggaccctctgccaggctccacaagaggtcaggacagtgcagtgtgttcacaaggccagtttctgatcgtccgccccgaggctgaggaccagtaggcagctcccaagatggtgagtagacagcctcgtgtgccctgggtttctctcccagtctttgtaggaccctggaagcagcccctcctcccctcccagagctctaagatgatgatttcaatctccgggtcatcatcttttggtgcagtgggtctgaaatgtggctttgcgctaacatcacccatgggcactttttaaatgtttttttgtttcattttcttttgtttttgagacagtctcactttgttgcctaggctggagtgcagtggcacgctctcggctcactgcaacctccgccttctgggttcaagcaagcacgtcccactaatttttgtatttttagtagagacggggttttgccatgttggtcaggctggtctgaaactcctgacctcaagtgatccactacactcaacctaaatttccccttccccctttcccctccccctcccctaccccttcctttctctttctttctttcatttttttttaacaaggtgaaattcatataacataaaattaaccattgcaaggccaggcacagtggctcacgcctgtaataccagcagtttgggaggccaaggcaggcaaatcatttaagattaggagtttgagaccagcctggccaacatggcgaaaccctgtctctactaaaaatacaaaaattaggctgggcgcggtggctcacgcctgtaatcccagcactttgcgaggttgagctgggtggatcacctgaggtcaggagtttgagactaccctggccaacgtggtgaaaccccgtctctactaaaaatacaaaaattagccaggcgtgttggcgggagcctgtagtcccagccactctggagggtgaggcaggagaatcgcttgaacccgggaggtggaggttgcagtgggctgagaacatgccaccacactccagcctgggcaacgaaagcgaaactccatctcaaaaaaaaaaatacaaaaattagttggatgtggtagcacattcctgtagtccctgctactcaggaggctaaggcacgaggattgcttgaactcaggaggcagaggttgcagtgagccaagattgcaccactgcacccaagcctgcgtgacagagcaagactctgtctcaaaaaaaaaaaagaagaaaacaagagcgactcttcagccaggctcagtgttctttcttgagacctgtgttcaacggtactacatgtgtatctgcccagtggcaatgttaaatacttcttaccgtcaatcacagtctccaaaagagtgtgaaagccaccataggagcatctgaacctcatggaattttccaaagcaatgacaatgggttttttgcccaagtagcccttccccaatcagacactgagcccagcactgtcctctaaaatgtccccaagtcccccttatccaggtcctgccccctgaggctgcacaagtaggtttcctggagggagcctgtgtattagtccagtctcacgctgctcataaagacatacccaagggctgggcgcggtggctcacgcctgtaatcccagcactttgggaggtcgaggtaggtgggtcacaaggtcaggagttcaagaccagcctggccaatatggtgaaactttgtctgtactaaaaatacaaaaaaattagctgggcgtagtggcacatgcctgtaatcccagctactcgggaggctgaggcaggagaattgcttgaatccgggaggcggaggttgcagtgagatgagatcgcaccattgcactccagcctgggcaacaagagtgaaactctgtctcaaaaaaaaaaaaaaaaaaaaaaaagacatactcaagcctgggtaatttataaaggaaagaggtttaattgactcacagttcagcatggctggggaggcctcaggaaacttaacaatcatggcagaaggggaagcaaacacatccttcttcacgtggcagcagcaagaatgagcaagaggaaaagctccttgtaaaaccatgaggtctctcgagaactcattcgctgtcatgagaacagcatgattcgcccccatgattcgattcagttacctcccaccaggtccctcccatgacacgtggggattatgggaactacaattcaagatgagatttcgcctgtaatcccagcactttgggaggctgaggtgggtgcatcacttgatgtcaggagttcaagaccagcctggccaacatggtgaaaccccatctctactaaaaatacaaaaaattagctgggcgtggtggtgcatgcctgtaatcctagctactcaggaggctgaggcaggagaatcgcctgaactcgggaaacggaggttacagtgagtcaagatcgcaccactgcactccagcatgggtgacagagcaagactccatctctaaaaattaatagtaaaataaaaaatcagaaaaaatttttttgaatgagatttgggtagggacacagccaaaccatatcagcctctctctgagtcatgtctctgttctgctttgcagggtgaaaggaaaggggtcaacaagtactatcctccagacttcaaccctgagaaggtaagcaggctctccgctccaggtccacagtagcaaaaagacccacgtcatcccctcttggggttagagccactgctgcggaaggatgggtggcccccaaggtctttttgtcttctgcatgtcacctgagtctcgaggctgtcttcacttttgggtgataactgtggctctcctcagggacctgtaactccatgtccacactatactagagtatagtgtgtttacagcaggggcccaggataaggcagagcgcacagatgaagggtcagatcccatggcttccccagctccagcacctgtggcgtcctggttgtcccctctgcctggaatctcttcctccatttcaccatactctcacttccttaagtgcttttctcacagaggtcctccctgaccactgtctcgttctctgttgcattgctgagcactttatataatctcatagcccttataactccctcacttattcatttatttgcgtcttgtccatctcccccgctagaacattctctccctgaaggcagagatgttcatctatcttattgtggctgtgtccccacacagtaggtgctcagtaagggcccaagtgtcccagctgcctcgtcctgagtataggatttagcctctctatgccaaagtttctccatacgtcagaagggggaaataaaatgagctgacctcacagaatcattgagggataaatcctagctactcaggaggctgaggtgggaggattgcttgagcccaggaggtggagactgcagtgagtcataatcataccactgcaccccagcctgggctacagagccagaccctgcctcaaaaaaaaaaaaaaaaaaagccggcgccatggctcacgcctctaatcccagcactttgggaggccaaggcaggtggatcaccaggtcgagagtttaagaccatcctggccaacatggtgaaacttgatctctactaaaaatacaaaaattagctgggcgtagtggcccacacctgtagtcccagctacttgggagactgagacaggagaatcgcttgaacccggaaggcggaggttgcagtgagccgagatcacgccactgcactccagcctagtgacagagcgagactctgtctcaaaaaaaaaaaaaaaaaaataaggtgatgcacatgaagtccccagcgaatgtttgccagtcttgtcacctcacctcatcttccccataaaacctggaagtaataatgaccattatacgtagttgacagacaagggaaacagaggctcgggaaggcaaaacgtgaggtcactcgcccagggtcccctggctctttcagctcataaatgggaacagggctgggcgcagtagctcacacccggaatcccagcactttgggaggccgaggcaagtggatcacctgaggtcaggagttggagaccagcctgggtgacatggtgaaaccccgtctttactacaaatacaaaaaaaatagccgggcgtggtggcaggcgcctgtaatcccagctacttaggagcctgaggcaggagaatcacttgaacccgggaggcagaggttgcagtgagccaaggtcatgccattgcactccagcctgggcaacaagagcaaaactccatctcaaaaaataaataaataaataagagagggactattcaaactcacgttcctggttccaagcctacatgttccagtaagacctggatgccccctattgctatgaacacccgtcctgcaggacataagaatcaaggcctctcccacctgtgagacacttgtcccaaagcagtgggggtggcagaaaattgtgagctcctccagctcagcagcactaatccgctcctcatcctctccacacagcatggctctctcaaccgataccacaacagccacccgcttcgggagcgggctcggaagctgtcacagggcatcctcatcatccggtaaggcccagcatcacctgaggaccccaccgtcctgccccattccttcagtctcaaggagagttcagtgccctcattggcccagtgctgcagggtcttcattccataaagcagaaagtcaccgtatcagtcagttattgccgtgtgacaaaacaataagcatttattattgctcacatgtctgcagctcagcaaaatatctctgctgggcttggaagagcttggctgggctgggctaggctggcctgatctgggctgggctcccatgtgtttcagagttggctggctggggactggctggtttagcagggacttgacctgtacagctgggctctgctccgtgttgtatctcaacctgtagcaggccagcctggacttgatcacataggactctcaaaaaagacagtgatcgtagttgggcacagtgggtcacgcctgtaaacccagcactttgggagggtgaggcaggtggatcacttgagaccaagagttcgagagcagcctggccaacacagtgaaaccctgtctctactgaaaatagaaaaaattaggctgggtgcggtggctcacacctgtaatcccagctcctcgggaggctgaggcaggagaatcacttgaactagggagctggaggttgcagtgagccaagaccatgccactgtactgcagcctggcaacagagcgagactccatctcaaaaaaaaaaaaaaaattcgccggaattggtggcgcacacctataatcccagctacttgggaggctgaggcataagaattgcttgaacccaggaggcagaggttgcagtgagccaggatcgcaccactgcactctagcatggggaacagagcaagactctgtctcaaaaaaaaaaagtcgcagcagcacccaaaggcggctgtccctggacctggtcagtctgctttctagcaggcaggaagttcctgctcagttacaatggttgtgattctttttcttccatatatccatttcctgtgtaatgtgagtgcagcaactcccgttaacagggcagtctaataccccacccctcaaatcacaaccgcggccagagtcgcaggtgtggagacccagggagtgtccaagtggacaagtgcaagtaagatgctgtctgtctttgcagattcgaaatgccatataacatctggtgcgatggctgcaagaaccacatcggcatgggtgagcctctgcccaccctccattcagtcctgcaaacatcagaccccctaactgctggatgccgccggggtgggggtgggagggtcctgatcaggaatgagggaggagacgggcacccgagtgactggctggccatggaagcccctttgcagagggattaggaagccaggctctggcttccaatcccgtctctaactcctcctagttggggaaccctcagcaagtgacagtgagcctctttgtacctcattttacccatctgcaaaattcagatggcaatgaaattaccacccccgcctgacccccttccaggtgttcgttacaatgcagaaaagaagaaggtgggcaattactacacaaccccgatctacaggtaagggcggcttggtggcatcttgggaacaggtggggtggccacagggcgagggggctacaaagagcctgagttgcggggggaacccattccctgcaggactcctggaaatcgccctggttggtgaatcagggcacaccccacccccgcaaccctccatggctcccaccttcctcagtaaaagcccaagtcctccccctggctcacaaggcaccacacactctgcctgtcctttcttcaccctaacctcctcctgctgtccccctccctggcctcctcgttgtccctcacacaccccagggacacacccacctctgtgcttccacctggaatgctcttccccaggtagctccaaggctcctccctcacccggggtttctgctcaaacagcacccctcagagacaccttttctaaagtgagacttgacactggttgcttgtgcccttgctatcaaggtgggccctgctgggacgtcagcctttccatgagcaagttggcttttccactactcagcaatttccccagcagctggcactgagcctgccacagagcagcctgtcttgggcgggtttgttgaataaatgaactagtggacaaatgaatgaacaaatgaatgaacagaatgaacaaatgataagtgaattaacaaatggatggatgagcaaatgaatgtatgaattactttaacaaatgaatcagtgaaccaacaaacaaatgcactaatgaatgaacaaatgaattaacgaataaatgaaccaaaaaaatggatgagggaatgaatgaatgaacaaacagctgaatgaacaaatgaataagccaactgcagccccactgacagaaggtccgttctgggtgcccggatgtgcccctttttgcccgtggctctacacggcacacagtgggtgctcagtgaatttttgtcaaatgacaccattgggtggaaggaagcaggcagaggcgacagggctgtcctggtgcacagccacagcctcctgactcctgcccaccgctccctcccaggttccggatgaaatgccacctctgtgtcaactacatcgagatgcagacggaccccgccaactgcgactacgtgatcgtgagtggcgcccagcgcaaggaggagcgctgggacatggcggacaatgagcaggtgctgaccacaggtgagcgccacccacttacctgcctgggggccctggccctgagtctgcgctggggcccccaaagcccagccgagctctgatcgttgcagagcatgagaagaagcagaagctggagacggacgccatgttccggctggagcatggcgaggccgaccgcagcacactcaagaaggcgctgcccacactgagccacatccaggaggcccagagcgcctggaaggacgacttcgccctcaacagcatgctgcggagaaggttccgggtgaggggggctccagcccggggtcagagaggatgcatggtggaccaaggcccgggtccagccctccccccaccacatcctagctttgagcaggccactgtaccctctgagcctcagtttccccatctgctacatggtgaccatgccctgtcttaatccattctggctactataataaaaaataccatagacagaaacagtagaaatttggctgggcacagtgactcacgcctgtaatccagcacattgggaggatcgcttgaggccaggagttcaagatcagcctgggcaacatagtgagacaccaccccccccctcccccagcatctctaaataaataaataatagaaattaattttttttttgttttgagacagtagtcatctcgctctgtcatccaggctagagtgcagtggcgcaatcttggctcactgcacctctgcctcctgggttcaagcaatcctcctgcctcagcctccagagtagcaggaattataggtacccaccaccaccacgcctggctaatttttttttttttttttgagactgagtttcactcttattgcccaggctggagtgcaatggcatgatcttgggtcaccgcaacttctgcctcccgggttcaagtgattctcctgcctcagcctcctgagtagctgggattataggcatgcaccatcacgcacagctagtattcttagtagagacggggtttctccatgttggtcaggcaggtctcaaactcccatcctcaggttatctgcctgcctcggcctcctaaagtgctgggatcacaggcgtgagccaccgcacctggccaatttgtgtatttttagtagaggcggggtttcaccatgttggccaggctggtctcgaactcccaacctcaagtgatccaccgtggcctacccaaagtgctgggattacaggcgtgagccaccgagaccagccaaaataaacaatagaattttatttctcatggttctggagtctgcgaagtccaggatcaaggcgctggcagatccagtgtctggtgagggcccatttctcataggcggtggcttctagctgtgtcctcatgtggcagaagggacaaacaagttcccttgagcctccttttataagtccaataatctcattggtgaggacgtagcccttctgacttaattacttccccaaatgcctcacatcttttaacactgtcaacgttgaggattaagcttcaacatatcaatttgggggacacagacattgagaccatagctcacccctacctcaccatgccatgggagatacctacctggttgcctccttttatttatttattttttttctttttgtgactgggtctcactctgttgcccaggctggagtacagcggcaaatcatgtctcactgcagcctcgatgtcccaggttcaagcaatcctccccactaagcctcccaagtagctgggacccacaggcatgagccatcacacctggctaatgttgggttttttgtgttttgtttttgcttagactgagtctcgctcgtcgcccatgctgcagtgcagtggcatgatcccggctcactgaagcctccaccccaggttcaagcaattctcctgcctcagcctcccaagtagctgggattccaggttcccaccactgtgcatggctaatttttgtatttttagtagagactgggtatcaccatgttggccaggctggtctcgaaatcctggcctcatgtgatccacccacctcaacctcccaaagtgctaggattacaggcgtgagccactgcatctgacctggccaccacattttaaatggaacctcttggctgggcgcggtggctcacatctgtaatcccagcactttgggaggctgaggcaggcggatcacgaggtcaggagatcgagaccatcctggctaacatggtgaaaccccgtctctactaaaaatgcaaaaaaaaattagccaggtgtggtggcgggtgcctgtagtcccagctacttgggaggctgaggcaagagaatggcgtgaacctgggaggtggagtttgcagtgagctgagatcgtgccactgcactccagcctggccgacagagcaagactcttgtctcaaaaaaatatagaattaaactaaattaaaaaataaatggaaccgcccagcccatcccctacccacctgtcctgcattttttttctccttatcactgtctcaccactagaggccagctccaccagggcaagggtttttccctgcctgccactgtatgccgagtgtccagaacaaagcctagcacaaggtgggtatcccagaaatatttgtgggatgaggccgtgcgtggtggctcacacctgtaatcccagtgctttgggaggctcaggtgggaggattgtttgaggccatgagttggagaccagcctgggcaacatagtgagaccccatctctacaaaaaaaaatttttttttttttttgaaacagtctcccccctttcgccctggctggagtgcagtgacaacgatctcagcccaccgcaacctccacctccccggttgaagtgattttcatgcctcagcctcccaagtagctaggaccataggcgcatgccaccatgcctggctaatttttatatttttaatagagacaggattttgccttgatggccaagctggtctcaaactactggcctcaagggatccacccgcctcagcctcccaaagtgctgggattacagacatgaactaccaggcccagtctctacaaaaataaatgttttaattagctgggcgtggtggtgcacatctgtagtactggatacttgggaggctgacatgagagaatcgcttgagcccaggagttcgaggctgcagtgagctatgattgtgccactgcactccagtctgggcgacagaatgaaactgtctcaaaaagagtaaatgagaccccgagagttggagcagtgccccctagtacacagaagagacagggctttgacaccccctatctctggtgttcttggccctcaacacaggaaaagaaaaaagccatccaggaggaggaggagagagaccaggccttgcaggccaaggcgagcctgaccatcccgctggtgcccgagacggaagatgaccgcaagctggcggctctgctgaagttccacaccctggactgtgcgtaggaggccagggggaaaaggggacagggaggctcagagttgcctggagatggggggtcctcagccatgagtggactctggtctaccagagggcagttctggaccccctcccctgccgcccctgaaatgtcctctcctctcctctagcctacgaggacaagcagaaactcaagcggaccgagatcatcagccgctcctggttcccctctgcccccggatccgcctccagcagcaaggtcagcggcgtcctgaagaagctggcacagagccgcagaaccgcgcttgccacctcccccatcaccgtcggggacctgggcatcgtgcggcggaggtctcgggacgtcccggagagcccccagcatgcggccgacacccccaagtctggggaaccgcgggtaccagaggaggctgcccaggaccggcccatgtcccccggagactgtcctccggaaacaactgagacccccaagtgcagcagcccgagggggcaggaagggagccgtcaggacaagcccctgtcgccagcaggctcctcccaggaggcagctgacacccccgacacgcggcacccctgcagtctcggctcctccctcgtggcggactactccgactcggagagtgagtgagcgatccccatcctggagactggacccgctctagaggcccggacacacccaggaggcccctcacagactgcagacccccggctcgcccaccagccctgggagagctcagatgccgcatcctccccagaccgcgccttcctgcaaccgtggagttatttatttggtcctggtgagggtgtttgtgccttgtgagactccgtacattaaagacctgtctcttcttccctgtcttgggttgttagatggaccctggggctgcccccccacccccccaccttgaccaagcttggtaggcctctcatcagcaaatgctggtatagggtcatagctgtgaccacagacatggtccccttccagagtaacaagagtctcaaggtggtggtcccggttggccaggaatcaggacagacttcctggaggaggaggcatgggccaagtgtgaagggtgaaaagggggccaggaaccacacacacaaggccagggacaaggcacacggggtacccaggatgtgtgccagatgcagcaggggctggagcacacaggtgtgagctttttattatacccagcccaggggtggcccatggaaaagccccccgtgcatgttacttttggggtttttttgttttgtttttgagaccgagtcttgctctgtcacccaggctggagtgcagtggcgcgatctcggctcactgcaacctctgcctcctgggttcaagtgattcttctgcctcagcctcccgagcagctgggactacgggtgtgcgccaccacgcccagctaattttttgtatttttagtagagactgggtttcaccatgttggccaggctggtctcgaactcctgacctcaagtgatctgcccgactcggcctcccaaaatgctgggattccaggcgtgagccacagcgcctgtcctgcatgttacttttgaatgaaaccgagcagaaaatggcccagaaacagccttgcatccatcaaggggcacacgaccccccactacctccccctcaaccttggaagatcatttaacaaattctttggtttgaacacttgatgttaccttgccactggggatacatccctaactctagacagcaggttgttaaacacggggcctggtatccactaggcgtcccataaatgctgccacttttgtggttccgaggaggcggctcactccgttcgggcttggcaggagtcgtggagtgggttcggccacgtggaatccgcgtcctgggaacccgtggaatccgcgtcctgggaacccgtggaatccgcctcctgggaacccgtggaatccgcctcctgggaacccgtggaatccgcctcctgggaacccgtggaatccgcctcctgggaacccgtggaatccgcctcctgggaacccgtggaatcgggttggatgcgcatgtgcgtgtctctttttccgggggaggctccgcccacggccccgccccgctcccaagtgcgcgcggacccctagctccctctgagttgcgctgggcttggctgctgcaccatgaccctggaggcgatccgctactcgcggggctccctgcagatcctagaccagctgctgctgcccaagcagagccgctacgaggcggtgggctcggtgcaccaggcctgggaggccatccgcgccatgaaggtgcagcggggcggcggggcggcggggcggcggggcggcggggcggcggggcggcggggcggcggggcggcggggcggcggggcggccgggttggaggtgggagtgcgcccgcgcctgcagcttccgacgcccaaatccctgccccgcaggtgcggggcgccccggccatagccctggtgggctgtctcagcctcgccgtggagctgcaggcgggcgccgggggaccgggactcgccgcgctcgtggccttcgtgcgcgacaagctgagcttcctcgtcaccgcccggcccaccgctgtcaacatggcccgcgccgcccgcgacctggctgatgttgcagcccgggaggccgaacgggagggcgctacggaagaggcggtccgggagaggtacggggatctggtaccaggcacggcgctgagcaggaattatattgactctttttaagtacagtgacccactatacagatggggaaactgaggcacggcgaccttaagtcccttgtccagggccccacagatggggagactgaggcacggcgaccttaagtcccttgtccagggccccacagatggggcccagagtctagcctgggcagcctggccctgaaacctaactccttaatcgtgcctcccctgaatacacgcagccccttatccgcccttggaggccctttttagtatctccgtgttctcttggtttctgcttttgaggaactttttttcctgtcctggtccccttcctgccatctttttccccccacttcctttctgctccagccctccctgcaatgtcactttaccccaccaagctcgagcctgccttacagcctttgcacgtgccattggtgcgggccaggtatccatagcgccctcctccaccattctatatgatccagctcacccgctgctctctgttgcctgattctgccggcttttccttcattttattatctcttcatcagctggctcactcaccccagtgtcaactccacaggagcagagatttttgtcttgtttactgctgggtcataccggaactgcttggtaaacatgtctttgcatgaatgaacggagtgacacttcggtggccctggccgaagggtccaggccccacagcaatgagaggctttgagcaggagggctccaggacagcagcgttaggcagagaggaggcgttggcctgggccccgggtcctggtggctggtgctgaaaactccttgtcaccccagagtgatctgctgcaccgaggacatgctggagaaagacctcagagacaaccgaagcattggggacctaggagcccgccacctcctggagcgggtggcccccagcggtggcaaggtgactgtgctgacccactgtaacactggtgctctggccaccgctggctatggtacagccctaggtgagagggcctcctcagggggtaggggagggccttctaggaacttttttagatacaagagaaagaatcccaaacccaaaccactttatccacaaaaaaaatgggaaggtactagttctagtacggaaacacttatacagttggcttcaggtatggcaagatcaaggggctcaaccagtagcatcaggacctatctatctctgtgcttcagctctgccctccttcatcttcaggttccatgggctggcaggcggctgttagggtccaaatcatgaggaaaagagcctcctatactagaaaagtctccttgtatctcagggggtccactagggcacctgcccatcccagagcagtcattcgatgggccccgcctgagccatatgcctagagccagggcaggacgtggactccaggaggaactggggagaagggagtgagcagagaaagattaggtagctgtgaccaggagacagggggagtgggctgtagggggccaaggcagcagattccacttgaccctaaattcaccaggaaatttccctacctgcctgagtcccaccttcatccctgggaactgaggccttaatggaaagacctctgcctttgattcattcactcacccagcatttagtaagcacctgctgtggctcagacaccgccatttgctggggacgcagcagtgaacaaaacagacaaaatctctgctctcaggggtcccagggaagcagaaggaacagtcaacaggcaaaataagtacagtcatccttcaatatctgtgggggactggttccaggacctcccacagataccaaaatccatggatgctcaagtctctgatataaaaatgccatcatatttgcatgacctatgcacatccacatatatatatatatatatatatatatatatttttttttttttttttttttttttttttgagacagagtcttgctctgtcgcccaggctggtgcagtggcatgatctcagcttactacaacctctgcttcccgggttcaagagattctcatgcctcagcctcctgagtgtctgggattataggcgtgagccactacgcccagctaatttttatatttttagtagggacggggtttcacgacattggccaggctggtctcgaacttctgaccttaggcggtccgccagcctcggcctcccaaagtgctgggattacagacgtaagccacagtgcccagcccacccctatattttaaatcgtgtctagattgcatatcatagctagtcccatgtaaatactatgtaaattgttgttactggctaggtgtagtggcggtgcaggcctgtaatcaggaggctggggtgggaggattgcttgaactcagaagttctagaccagcctttgcaacacagcaagaccctgtctctatttttaagcctgtaatgccagcacttcgggaggccaaggtgggcggatcgcttgagctcaggggttcaaaaccagcctgggcttcatggcaaaaccccatctctacaaaaaatactaaaattagctgggtgtagtggtatgcacctgtggtcccacctattcgggaggggactgagatgggaggattgctttttatttatttatttattttggagacagagtcttgctctgtcacccaggctggagtgccatggcacgaccttggctccttgcaacctctgcctcctgggttccagcgattcttttcaagtattttctttctttcctttttttttttttttttttttttttgagacagagtcttgcactgttgcccaggctggagtgcagtggcgcagtctcggctcactgcaagctccgcctcccaggttcacgccattctcctgcctccgcctctcgagtagctgggactacaggtgcccgccaccacgcccggctaattttttgaacttttagtagagatggggtttcaccgtgttagccaggatggtctcgatctcctgacctcgtgatccatctgcctaggcctcccaaagtgctgggattacaggcgtgagccaccacgcccagcccaaatattttcaatccacatggttgagtccatggatggagaacccatagaaaaggggggctgcctgtacacatgaggtgttagaaggtgataaatgctaaggacagagagcaggaaactgaaagtgtggggattgctatgcaaaactgatatatcagggaaggcttcaccgagaaggtgtcctttaaacagacgtgaaacggagctatgcgagcattgggaagagcataccaggcagagggaactgccactgcgagggcccctgggcgggactgtgctcggtaagcctttggcaatccacgcccagactaggagcctgcacccctaaccaatggaccaccctgtctgtttgcccctccccggggccttctcctggtgggtggggcccccgcaggtgtgattcgctcactgcacagcctgggccgcctggagcatgccttctgcacagagacccggccctacaaccagggagcccggctgacggcctttgagctggtctatgagcagatccccgccacccttatcaccgacagcatggtggctgctgccatggcccataggggcgtgtcaggtaagcagacggtaagccctgggggcggggctctggagcatggggccaggtaatgacccccaacttctcatacgccccctccccagctgtggtcgtgggagctgaccgcgtggttgccaacggcgacacagccaacaaggtgggcacctaccagctggccattgtcgccaagcaccatggcattcccttctacgtggctgcccccagctcttcatgtgacctccgtctggagaccggcaaggagatcattattgaagagcgaccgggccaggagctgaccgatgttaatggggtccggattgcagcacctggtaagctgccccctcagaaaggggacaccccagctcctgggcacttcatggaggcaggtgatatgcaggtccttgtcatccttctggaacatacacagctcctacaagccactttttcttttttcttttttttgagatggagtcttgctctgtccctcaggctagagtgcagtggcacgatctgggctccctgcaacctccacctcccgggctcaagcagttctcctgcctcagccccccaagtagctgggactataggtgggtgccaccacgcctggctaatttttgtatttttagtagagatgaggtttcaacatgtggaccaggctatttattaactactgacctcaagcaatcagcctgcctctgcctcccaaagcgctaggattacaggtgtgagccacagcacgcctggcccaagccacttcttctaacaggtgcatcctggaggtcagatccaatgttggaatttacaactaaccggttatatgaatgatcttgagtaactgtcttgctattctccacttaggttttcttaagaggaaataagaatatctggctggccacgtgtttgtaaagaaaaaccaagacggccaggcgaggtggctcacacctgtaatcccagcactttgggaggccgaggcgggcagatcacaaggtcaggagttcgagaccagcctggtcaacatagtgaaaccccgtctctactaaaaatacaaaaattagccggacatggtggcacccgcctgtagtcccaactactcaggaggctgagggaggagaatcacttgaacctgagaggcggaggttgtggtgagctgagattacaccattgcactccagcctgggcaacagagtgagattctgtctcaaaaaaaaaaaagaaaagaaaaagcaagatatttctacacttatttttatttgtttattttcatagagatagggtctcgctatgttccccaggctggtctcaaactcctggcctcaagcgatcctcctgcctcagcctcccaaagcactgagattacaggtgtgagctcccatgcctagctgcaagacttttcttagctgcctatacttcctggctgtgcaaccgttagcaagttccctaaattctctaattccctaagatcctcactggtcctatctgtaaaatgggctatggctagaacctgctgcataaacccaagggcggtcagtgaattaacccacaggacatttagatcaatgactggccctttaaatagttcatgcactcagatgccgtggctcacgcctataatcccaacactttgggaggcggaggtgggcggatcacttgaggtcaggcgttccagaccagcctagccaacagagcgaaaccacgtctctactaaaaaaatataaaaattagccaggcgtggtggcacatgcctgtagtcccatctacttgggaagctgaggcatgagaattgcttgaacctaggacgcagaggttgcagtaagttgagactgcaccactgcactccagtctgggtgacagagcgaaactccatctcaaaaataaaaaaaaaggccgagcgctgtggctcacgcctgtaatcccagcactttgggaagccgaggcgggcggatcacctgaggtcgggagttcaagaccagcctgaccaacatggagaaaccctgcctctactaaaaatacaaaattagccgggcgtggtggcacatgcctgtaaccccagctactcaggaggctgaggcaggagaattgcttgaacccgggaggcggaggttgcaatgagccaagatagcgccacagcactccagcctgggcaacaagagtgaaactccatctcaaagaaaaaaaagaaaaaacagttcatgaaatattagcatgaaccaatattagcattatggggccaggtaaaatggctcacacctgaaatcccagtattttgggaggctgaggtgggaggatcacttgagctcaggagttcaagaccagcctgggcaacattgccagaccacaatctctaaaaaaattgttttgccaggtgtggtggttcatgattgtaaccccagcactttgggaggctgaggcgggcggatcacctgaggtcaggggttcgagaccagcctggccaatgtggtgaaaccccgtctctactaaaaatacaaaaaaaaaaaacgttagctgggcgaggtggcaggcgcctgtaatcccaactacttgggaggctgaggcaggagaatcgcttgaacctgggaggcacaggttgcagtgagttgagatcatgtcactgcactccagcctaggtgacaagagcaaaactccatctcaaaaaaacaaaaaaacagctagacatgatggtgcacatctgtggtcccagctgctcaggaggctgcagcaggagaatcgtttgaatccaagaggcagaggttacactgagccaagatcgcaccactgtactacagcctgggtgacacaacgagactctgtgtcaaaaataataataataattaaaaataaaactaaaaaaataagtgggatgggccaggtgcggtggctcacgcctgtaatcccagcactttgggaggccgaggcgggcagatcacctgaggtcgggagtttgagaccagcctgaccaacatggaaaaacctcgtctctactaaaaatactggctgggcatggtggtgcatgcctgtaatcccagctactcgggaggctgaggcaggagaattgcttgaaacctgggaggtggaggttgcagtgaaccaagatcgtgccattgcactccagcctgggcaacaagagcaaaactacatctcacaaaaaataaaaaaataagtggcatagatgtgtataggactttgaatttttcttggggactgacattctaggggcagtggcgagtctaaacttactattgagtacaatgtccatgcctgcatgtacttttggggtgagaatcctcaggttctcaaggactccccaactccaagaaccactgtggtagaaacagatgactacaacctgagaactttcacagaagcaaattcttgcctccttgcctcccctctctcccctgcagggattggagtttggaatcctgccttcgatgtcaccccccacgacctcatcactggtggcatcatcacagaactgggggtctttgcccctgaggagctccggacagccctaaccaccaccatctcttccagggatggaaccctagatggaccccagatgtaaccaactcagctctccctagcctgcctctctaggtttttcaatacatttcttgaatggctacccaaaagctgaccgtccagcccctgaccacacttgttcctagtgcagggagctcagacagggccttccatctagagcccagcacctagagccaggctgcccagattcaaatcctgactccgccacttttcccactgtatgatcttgggcaagtcacttcacctctctgtgccttggtttcctcatttataaaatgtggataacaggccgggcgcagtggctcacacctgtaatcccagcactttgggaggccgaggcaggtggatcacaagatcaggagattgagaccatcctggctaacatggtgaaaccccatctctactaaaaatacaaaaaattagccgggtgtggtggtgggcacctgcagtcccagctacttgggaggctgaggcaggagaatggcgtgaaactgggaggcagagcttgcagtgagccgagatagcgccactgcactccagcctgggcaacagagcgagactccgtctcaaaaataaatataattaattaattatttaattaaaaaaataaaaaataaatgtggataatactagtacctccctcttaaggtcagggctggagctagggtgacatctccagggcagaattttaagaggacaccaaaaaagctcagcaaccaagataaaaaatattttaaagcaatattttgttttgggttttttttttttgagatcaagtatcactcgttacccaggctggaatgtagaggcgagatctcagctcactgaaacctgtgcctccccggttcaagcgattctcctgccacagcctcctgagtagctgggattacaggcatgcgccaccatgcccagctaatttttctatttttagtagagacatgatttcaccatgttggccaggctggtctcgaactcctgactcaaatgatccccctgcctcagcctcccaaagtgctgggactacaggcatgagccactgtgcctgaccttacagcagtattttttaaaaatcaaaattaatgcaaaaatccatgatgaggccaggcttggtggctcatgcctgtaattccagcactttgggaggatcccttgagcccaggtgtttgagaccagtttgggtaacataggaagagcttgtctctacaaacaaaaatttaaaaacaatgagctgggcatggaactcacacctctagccccagctactcaggctgaagtgggaggatggcttgagcccaggagttcaaggatgcagtgtgctttgattgcactactgcacttcaccctaagcaacagagtgagaccccatctctttaaaaaaaaaaaaaaatccatgatgaacaaaacaagtatttgtttgagacggggtctcgctctgtcgcccaggctggagtacagtggtgccatctcagctcactgcaacctccgccttctgggttcaagcgactctcctgcctcagcctcccgagtagctgggattacaggagcctggcactatgcctggctaatttttgtatttttattggagacaccatgttagtcgtggctggtctccaactcctgacctcgggtgatccgcgccccgcggcctccgaaagtgctgggattacaagcgtgagccaccgtgcccggcctaaataaaattttgaagaggctagaaccccgcacttgtgccttgagcttactgacctcaacaccctggttccactaaaactttatttacaaaattatgctgccggtctgcaggatgtagtttaacaatttgattattttggatattaaaatattttttaagtcttgaaaatattgtttactattaccaaagtttttgaaccttcttaaattctgtaccagaggtgagtgccacaccctaacctagtctgagtttttatgtgtaaagatcataaaacgttgtaagttttctaaaacacataagctctcaataaacgttagcttatcattgtcaccgttttgttcgtaatgtttgaaaactccaactgtgatccactacactacccttgtgggatgctgtctctttaactctgtgccacgttgtatcccgtgagttcttgcgtttttccgccccgctgtatcccatggttccctgtgccttccggctacgactgctcacagtcccgcctcttccgctgcgtgccggaccatggcgcaggggcagcgcaagtttcaggcgcacaaacccgcaaagagtaagacggcagcggcagcctctgaaaagaatcggggcccaagaaaaggcggtaaggagcggcccggggacttgggggcgaggtggacccccggcttcccggcctcacgtgagcacatctttccccaggtcgtgttatcgctcccaagaaggcgcgcgtcgtgcagcagcaaaagctcaagaaggtgtgcgggggcgagagatggagcccggagggcggcgagtagcgaggggtggaacccggaggacggcgaggggggatgggtggagcccggggatcagtgaggggagagggtggatcctggggacgagctaggagcgaggggatagagccaggggccgcgttaggagcgaaggatggagcccggggcgcagagaggggtaagaggtggaagctggcgagggataggggctgggggacgtgctagggacgagagatgaaatctggaggccggcgagggaaggagcacagggatcggcaaagggcaagggatgaggcctggaggactcccagctctgtgggcctcccttttcttccttgtgcaaggggtgcaggaacaccacttaccacttcaaaagggcctcgtagaagcaagacctgcggcccaaaaagggttccaataacgtcagcctcttgctgttactgttttctttaattgaactcaggaagacagcgaggtgacatgggaagggaattgaaagcccagctttgtaaacctagaacagcagagggctcaaagaagtgtgagggtgcgttggttatcgtcatttttttttgagtcagggtctcactgttgcccaggctggagtgcagtggccccattatagctcactgcagcctcagcctcctggacttaggcaatctttccgtctcagcctctcgagtaggtagaattgcaggtgctcgccaatacgcggctaattttattttttttgtatttttggtagagacaggtttcactatgctgctcgggctggtcttgaactcctggcctcaaggcatcctcccgcctctgcctcccaaaatgctgggattacaggcgtgagccaccctatggttgtttttaagtgcaacatttatatgtagatgggtaaggttgagcttgtaaagaagttggaaggagatttaaaactggttttggtgggagtcaaacctgggtttgaattgtactccacagtaaacagccctgtgatcttgagcaaattgtttcgtcaccccagagtgtcggttttctcagaactgggtacccactggcccgcttacctccgtggagtggggaatctcatggtcaccttgcactcagcatgtccaaaaccaaattcctgatcctcccttcccattctgccctcctccccctgtgatcacttccttccagatgccataggtcatccttgaatccctcctttctctcacatcccggtctcatcccatttgttttgttttgtttttttgagatggagtctcgctctgtcgcccaggctggagtgcagttgagtgatcttggcttaggtgcaacctctgcctcctgggttcaagcgattttcctccctcagcctcccgagtaactgggattacaggcctgcaccaccacaccgggctaatttttttttttttttttttttttttttgtaattttagtagagatggggtttcactatgttggccaggctggtctcgaactcctgacctcatgatctacccgcctcggcctcccaaagtgctgggattacaggcatgagccactgtgctcgcccctattttgcccttagaatcaatccagaatccacccgcctcccatcttcttggcccctacctggtcccacccacatcatttcccaccgggaccagtgcagccaccttctcccttgtctcctggatcccacctggtcctctcacagaagccagagggtgcccatgagcacctgagtcggttccctccctccttggctcagaatcctccatggcttccacctcacccaggaaaaaggtccagtcctcactcagccacaaggccctgtagaatctgccctcgtctccttccaccctctcctctgctaactccctctagccttactggcccctgacccctccttcccggagcccttcctgggctccttgtcccacctgagaacttttgcactggctgtttcctctgcctggattcctctcccaataatacacactgctcccttcttccaactctcttcaaagaggcctgccttgatggtgacctgtacccatccctcctcactcctgtttcctctttgccatagcagcgcttaccatcctttaacagtgtaacatattacgctactgatgcttatattgtcccggtacatgcactgaattccagctccatgacccctgcatccaggcacctggttagctgtcccgatgctggtgatcgtggtcattggaactgtttttgttttttgtttttgttttgagatagagtttcgttcttgttgcccaggctggagtgcagtggtgcggtctgggctcactgcaacctctgcctcctgggttcaagcaattctcctgcctcagcctctcgagtagctgggattacaggcgcccgccaccacacctggctactttttgtgtttttagtagagattgggtttcaccatgttggccagcctggtctagagctcctgacctcaggtgatatgcctgccttggcctcccaaggtgctgggattacagccactgcacccagccggaacttttttttttttctttgagacggtctcacgctgtcccccaggctgcagtgtagtggaacgatcatagctcactgcagcctggacctcctgggctcgaccacccaaacagctgagacgagaggcacgcaccagcacaccgtgctaattctttcttttagtacagatgcagtctcgctgtgttgcccaggctggtctcgagttcctgggctcaagtgatcttcctgcctcagcctcgcaaagtgctgggatcacaggcttgagccaccacacccagtccgtcggaactcagaatggcagggcagaggcagtctgggaaaggcgactgagccaccagtttggggttcacactgctggttttgccccacgcttgtgccttacttgccagctcccttgcccactcttcagatcctcagcttgccgtctgcaaagcagagatgacctggggcagaggaggctgcccttctagaggctgggaccagaggctgtgggcacgccggatcccatgcagtttagggacctgggcaaccagtgcctcctggctgcagcagactgtttccccatccataaaatgggcatgagcagaggtttagaagccaaggtgcagaagtgaggatttttgtgtgtgtggaggccccggagagtgcaggacttaaaccccagccaccagacccacagtcaggtgcggttcgaggggatagttgctgatctagccccctgcgagctctagccaggaagagggtgactggtcaggccctctctcagccccaggtcacaatctgactgccccgtgcttctccctcagaacctagaagtcggaatccggaagaagatcgaacatgacgtggtgatgaaagccagcagcagcctgcccaagaagctggcactgctgaaggccccagccaagaagaaaggggcagctgccgccacctcctccaagacaccttcctgaggacgctggccccagtgcaggccaacatcccaccccctacctccatatgggaccttgcaagtcatcccacaggctgcactgtcaggaagaggaccctgtcccccagcactgggcttcacctagaacttcagtgggggccaagggtgctgagaacccagcaatgaccaggaagatacagtcactaacttcatctgtccccgtgccccttcccaggtcctgcctccacaggtttaacccagaacaataaacctggctttgtcatccctcttgcagtcctgtgttcgggtgagcaggccaggtgagcccacaagtctccatgagtgacgtggcctggcgtgctccaccccaccccaccgcctttagcaaccatgtgcccaggggacagctgggcttctacacctctggccctgagcctgagagccgggaaagagtcttttctccatttaaccccgggtgactcactccctggccagtcctcacccctggggacacaaccagagtcaagctggacatcagtaggtcagatgccacctcacaggaccaaggtgccgattaaaccggaatacattcagaaaccacgtggtactacctggttaaagagtgccaactgtaaggtagtcaggacagccagtggtagcactacctatgagccaggccgcactgtcgcccaggctggagtgcagtggcacaatcatagctcacttcagcctccatcttccaggctcaagcaatcctcccacctcagcctcccaagtagttggaactacaggcatgcactgccatgcccagctgatttattgctttttgtagatgtggggtcttgctaagttgcccaggctggtctcaacttcatggcctccagcagtcgtcctgccttggcctcccagagtgctaggattacaggtgtgatccaccatgccccacaagttctaatgcgttatacatgtcatctagcaggatgccctgttcaggtcctgcataatgttccagagtggaattgatcccgtagttggcagagtcctgatccgtgctctcagctgaccctctggctacctgtcactgtcaagaccagaattcacttctgcccatcctggagttcctccacctccaaattgtttgagtctgttgtgccacacagtacctatggaatattctgggatctctggcctgataaccttccttttctcccttcactggatccaggtcaaggtcacagcacagggaaaagttgggctgtagtctgggtgatactgaactgctgtctttggggagtggtacctgtgcatacagtcagcttctaccctgagacggggtggggtgactggttccctagtggcttatccactcctggccacctcacctaccaaggagacagaggtgctgggtcaccagcagctacccccaaaccccatctcaagtgtgttttctgggttccacacagtgacagtcaagattttgccttttttttttttttttcagacagagtcttgctctggagtgcagtggcatgatcgtggctcactgttacctctgtgtcccaggctcaagcgatcctgacacctcagcctcccaagtagctgggattataggcatgtgccaccacacccagataatttttgtatttttagtagacacggggtttcaccatgttgaccaggctggtctcaaactcctgacctcaagtgatccacccacctcagcctcccaaaatgctgggattacaggctataaagaggggaaaaacagttcagtggttcttcagtaagttcattgtggagctaccgtatgacccagcaattccgctcctaggtatattcccagaagaatggaagacatgttcacttgtagatttgcatatccatgtaaatagcagcactgctcacaatagcgaaaaggtggacacaggccaggcgcagtggctcatgcctgtaatcccagcactttgagaggctgaggcaggccgatcacgaggtcgagttcaagacctgcctgaccaacagggtgaaaccccgtctctattaaaaacacaaaaattaggccaggtgtggtggcttacacctgtcatcccagcactttgggaggccgaagcgggtggatcatgaggtcaggagattgagaccatcctggctaacatggtgaaaccctgtctctactaaaaatacaaaaaattagccaggtgtggtggctggcgcctgtactcccagctacctgggaggctgaggcaggagaatggcgtgaacctgggaggcggagcttgcagtgagccgagatcgcggcactgcactccagcctgggcaacacagcaagactccgtctcaaaaaaaaacaaaaattagccgggcgtggtggtacacgcctgtaatatcagctactcaggaggctgacacaggagaatcgcttgaacccgggagaccgaggttgcagtgagcggaaatcgtgccattgcactcgagcctgggcgacagagtgagactccgtctcaaaaaaaaaaagaaaaaatggacacagcccacacatccatctacggatgaagggataaactgaggtctatccttcaatagaatattcacccttggggaggaaggccaagtgcagtggctcatgcctgtcatcccaactacttaggaggctgaggcaggaggatcacttgagcctgggagttgaaggcagcagtgagctatgatctcaccactgcactccagcctgggtgacaaagccagatcccgactcttaaaaaggaatgaagcactgatccaggaaactacaagaatgagcctgaaaataaactaagtgaacaaagcgagacacaaaaggctacatcttgaatcgtcccacttacatgaaatgtcccaaacaggcaaatccatggggggagaaagcagatgagtgattgccaggggctgagggagcgggaatggggtttcttttcaaggggtatgaaaatgtcctggagtcagaagtgattgtacaacattgtgattatactgaactgtgcactttaaaatggtgcattaggccgggcgtggtggctcataactgtaatcccagaactttggggggccaaggccggtggatcacttgaggccaggagttcgagaccagcatggccaatatggcaaaaccccaactctactaaaaatacaaaaattagccgggtatggtggtgagtgcctgtaatcccagccacttgggaggctgaggcaggagaatcacttgaacctgggaggcggaggttgcagtgagccaagatggtgccattgcatgtcagcctgggtgacagagtgagacatggtctcaaaaaataattaaaataaaatggtgaattttagcaccaccacccctccccgcccaaacatgcagagagaaatttcattaaaaagtcctaacttagcatcttgaaaaatcaggaatcagggcagtggaagccgcacgcatgagatggaaagactgagtagtctggcgtttcccaagctgccaggaaggccccgccctcattgtttctggagggggagggaggggctggaggatgaatgaggcccagatctcagactgagggataagggtagctctttcctttctgggcttccctttcacagccaatccccggcctctgttcagggctggggattggctgttccagcttccagggcacacatccttgagccccatctagggaacctggtttctctggctgtctgcccacctcaggcagtaattgacttctgcccttggttttgttttatttttttttttattttttatttttttgagatggagtctccctctgtcacccaggctggagtgcagtggcgtgatctcggctcactacaacctccgcctcccgggttcaagtgattatcctgcctcagcatcccgagtaactgggactataggcacacaccaccacactcgggtaatttttttttagtagagatggggtttcaccatgttggccaggctggtctcgaactcctgacctctggtgatctgcccacctcggcctcccaaagtgctgggattacagatgtgagacactgggcatgagctgtttttttttttgttttgttttttgtttttttgttttgggagatggggtctcactatgttgtccaggctggtctcaaacacttctacctcaagcgatcttcctgccttggcctcccaaagtgctgggattacaggcatgagccacccagctgacttaaggcctttcaggtagggccacttggctcattcagtatttttttttttcagagcaggaatgaaagtttattaaaaagccttaaaacaataaggaaaggaaagaaggaaagtataacttagaagagggccagacgggtaacttgagaaaccaagttctccttgttcagtacttattgtgattacttttatatttttttagagacagcgtcttgctgtgtcgcgactgcagtggtgagatcataagtcactgcaaactcaaactcctacactcaagtgatcctcccacctcagcctccctagtagttggaaccacaggcatgcaccaccacgcccagctaatttttttattttccgtagagacagggtctccctatgttgccccgactgattttggcctcaagccatcgtcccacttcagcctcccaaactgctgggattgtagacatgagccaccacacccagctattgtgactacttcatgccaacctctcttctaggcagaactaagaactaacattcaggctggccgtgatggttcacgcctctaatcccagcactttgggtggctgaggcaggtggatcacttgaggtcaggacttcaagaccagcctggccaacatggtgaaaccctgtctctactaaaaatacaaaaattggccggcatcgtggcacacacctataatcccagctactcaggaggctgaggcaggagaatcgcttgaacccaggaggcagaggttgcagtgagctgagatcatgctactgcactccacctgggcggcagagcaagactctgtctcaaaaacacaaaacaaaacaaacctgacattccagtgacaacagaaaaaagagacaacaccaagtttgtatccccttcccatccaggccacagtcctccctgcctttgtgcccacagttccttcccccgagacatcacctcagagaagccttctttgtcccctgcccccagaagtggcctgtttgattgtcttcttagccagggtcactttctgttactttcctctgtttctactttgcttctcaaggaccccgactctgttcggggctgtgtctcaagcaactagaacagctcacaataggcactcgatgagcaggtgtttattgaaggaacggttccttctaaaaccttttgtttcagtgaatgagttatgattattcaatggttcattcagccccttagctataaacaatacacccttcctaaacaatacaccctctccggagtacctgattcatatcattgtctttgaactattttacaactctgtaagttgtgaaaattgatagcaatacaaaatagttcttatctacagacatgcaaatgtcatatcctgtccagcctagaggttcagttgacaacgcttattcccctgtggaaaaccgaatttgcctacattcacacctttgcttcaacagcttgatttctaaagtgtctttttcaaggtcaggcaccctggctcacacctgcagtcccagcactttgtgtgtgtctgtgtgtggtttttgttaatgatgatgatgttttttagatcgtctccctctgtcacccaggctggagtgcaatggcatgatctcagctcagggcaacctccgcctcctgggttcaagagattttcctgccccagcctcccgagtagctaggactacaggcgcgcgccaccacacccgcctaatttttgtatttttagtagagatggggattcaccatgttgcccagactggtctcgaactcctgacctcaagtgatccgcctaccttggcttcccaaagtgtgggattacaggtgtgagccactgcgcccagcctaatcccagcactttgggaggcggaggtgggcagattgctcgaggccaggagttcaagaccagcctgggcaacatagcaagaccctatctctgcaaaacatttttaaaaattagctgggtgtggtggggcatgcctggagtcccagctactccagagactgaactgggagggtcacttgagcacgggaggttggggctgcaatgagcccaaatcgcaccactgcactccagcttgggcgatgcagcaaggccccatctcaaaaacaaaagtgtctttttcagactctcttgaacataacatctgcctgtttcccacatcagtgaaattaagagaaaaacaaggctaggtgtggtggctcacatctgtaatcccagcactttgggaggccaaggcaggcagatcacctgaggttaggagttcgagaccaacctggccaacatggtgaaaccccgtctctactaaaaataaatagattagccgggcgtggtggcaggcacctatagtcccagctactcatgaggctgaggcagaagaatcgcttgaacccgggaaacgaaagttgcagtaagccaagatcgtgccattgcactccagcctgggcaacagagcaagctctgtctcaaaaaaaaaaagaaagaaaaaaagaagagacaaaaaaacacaaaaaagaaacaaaaaaaatttctgacctggcgaacaggaagaaaaaaacattttagcacccattcatctttatatgttaagggagtggtgattttgccaccttcaaaaaattagcttccggtctttctatctggaatcagaaaggcaagggccaggacggggtgggctctgggccaggacggggtgggctctgggtgccatctggcaccggagttggacaccaggaggcgcctctaaccggggttaaatccacccgcaggctggtggcgtctcgaccagcccaggaatcctgcattctggctccctttgtgcctctgacgccagccccttcgaggagcaccccaggggcaaggaagggctttcaggcactgcaggtatggggtctggaatgtgcactcacccattcccccttcacctctcccctcagggctccccaaacagcctcattttccccttcactttcctgggtgactttcccctcctgcactcccccaagccctgattagtgctggagccaggagccccagactccggaagaacccacaccttgagttctttgccaggttctgccactttttgactgtgtgaccgtcaagtcccttcacctttctgagtctcagcctggggccgtggctcatgcctgtaatctcagcactttgggaggctgaggccagcagatcacttgaggtcaggagttcaacaccagcctggccaacatgaagaaacctcgtctctaccaaaagtacaaaaattagccgggtgtggtggtgcgcgcctgtaatcccagctactcgggaggctgaggcaggagaatcgcttgaacccgggaggcggaggttgtagtgagccgagatcacgtcactgcaccccaccccagcctgggcgactgagtgagactctgtctcaaaaaacaaaacaaaacaaaacaaaacaaaacgggaggctgagacaggagaatcacttgaacctgggaggtgaaggttgtagtgagctgagatcatgtcactgcaccccaccccagcctgggcaactgagactctgtctcaaaaaaaaaaaaaattaaaacctttctgagcctcagtttctctgtctgttacattgggatccccactccccctcagtgtgagttcaggagcctaagaataagggacataccaatttttttttttttttttttttttgagatggagtctcgctctgtcgcccagactggagtgcagtggtgcgatctcgactcactgcaagctccgcctcccggttcacaccattctcctgcctcagcctccggagtggctgggactgcaggcacccgccaccatgcccggctaattttttgtgttttttagtagagacggggtttcaccgtgttagccaggacggtctcaactcctgacctcatgatccgcccgcctcggcctcccaaagtgctgggattacgggcgtgagccaccgcgcctggcgggacataccaatgtgactaggagctgcgcttgtgtgctgggggcagagcagtgggaacccaagtcctgccatcccccgtcctctctgtccctccctagctcccctctcccagggacagaggcgtcattaaatgtggcttttcctgacagttattggccgggcgctgtggctcacgcctataatcccagcactttgggaggccgaggcaggtggatcacctgaggtcaggaattcaagaccagcctggccaatatggcgaaaccccatctctactaaaaatacaaaaattagccaggcgtggtggcgggcgcctgtagtcccagctactcggggggctgaggcaggagaatcgcttgaacctgggaggcaaaggttgtagtgagccgagatcacgtcactgcaccccaccccagcctgggcgactgagtgagactctgtctcaaaaaaaaaaaaaaattaaagcctttctgagcctcagtttctctgtctgttacattgggatccccactccctctcagtgtgaattcaggagcctaaggataagggacataccaatttctttctttttttttttttttgagacggagtcttgctctgtcacccaggctggagtgcagtggcgcgatctcgactcactgcaagctccgcctcccgggttcacaccattcttctgcctcagcctcccgagtagctgggaccacaggcgcccgccaccatgcccagctaattttgtcttttttagtagagacggggtttcaccatgttagccaggatggtctcgatctcctgacctcgtgatccgcccgccttggctggcggcggggattacagtgctggcggcggggattacagtgctgggattacaggcgtgtaatcccattacagggaggctgaggcaggagaatccagcttgaacccaggaggttcaagctgcttgaactcctgcttgaacccaggaggcagaggttgcagtgagtcaagatccgccactgcactccagcctgggcaacagagcaagcgagactccgtctcaaaaaaaaaatactttgggaggctgaggcgagcggatcacctgaggttaggagtttgagacctgcctgaccaacatggagaaaccctgcctctactaaaaatacaaaataagcctggcgtggtggcacatgcctgtaatcccagccactcaggaggctgaggcaggagaatcacttgaacccaggaggtggaggtttcggtgagccaacatcgcgccattgcactccagcctggcctgggcaacaagagcgaaactccgtctcaaaaaaaaacaacaacaaaaaaaaaaaacaaaaaaacacagttattcttgcctaagcctttctctcctgcctccaccttcccccgcctcgacctggcacgaccacttctcctggcagggccctgacactttgcccatgaacttctgtttcaaaaagaaagaaaagaaatgcaagaaggaaatcttgccagctgcgcatgccggaggggctgcgtcgtcgcgaccaggaagcaagcgaagcctacccagctggtttcctgcctgagtcaacggtggctgggggtgctgcagggggctggcagaagggagggaccctcagaaagctagggtggagatatccacgagctgggggtccttgtctccaccttcatctgagcccccagggtagccccatcttccacgggttgagagcacacgtggtttggggtcaggagctgtacatgcctagacagtgagctcacgctgggcgcgggcaggatcaatctggcttccatttccccaaagcccaagcttgctggctttactgagaaggaaggacgcaggtggttggaactacccccatcaaactcctttttttcctcttttttttttttttttttttttttgagacaagagtcttgctatattgtccaggctggtcttgaactccgaggcataagcgatcctacctcctctgcctttcaagtagatgggactggctgggcacagcccctcacacctgtaatcccagcactttgggaagccaaggtggaaggatcgatcgcttgagcccaggagctcaagatcagcctggccaacatagtgagaccccatctcttttaaaaaaattgttttaaaaaattagccaggcatagtgctacacgcctgcagtctcagctactcacgaggctgaggcaggtggaccacttgagcccgggaggttgaagctgcagcaagtcgtgatcacgccattgcacttcaacccacgcaacagagcaagaccctgtctcaaaacagggttagctgtttgaaggcagggcgtagtggctcccacctgtaatcccagcactttgggaggcggaggagcgtggatgacctgatgtcaggagttcgagaccagcctggccaacatggtgaaaccccatctctactaaaaatacaaaaattagccgggtttgccctgtgatcccagctactcaggaggctgaggcaggagaatagcttgaacccgggaggcggaggctgtagtgagctgagatcgctccactgcactccagcctgagcaacagagcaagactctctctctgtctgtctctctctctatatatatatgttagtatctattgttagagaattaaataagacattctcaccctctgataccccattctgtgttcctcctaaagtctacccactggcctagagtgacttctctgattcagcattacaggacgtacattggagccctttcaaagctagacttagccgacatagccacgtatcagatgctgaagagggctgctgggaaaagccagccctgaggtcctgtttgcaaggggagcaccagaaagacatgcttttcatttttgttctgtcttggtttgttttttcttgagacgaggtctggctctgtcgcccagactggagtgcagtggcgcaatcatggctcactgcagcctcaaccttctaggctcaagcaatcctcccaccacagcttcctgagtagctgggactacagatgcgcaccaccacacccggttaattaaaaaaaaaaaaaatttaggccaggcacagtggctcacacctgtaatcccagcactttgggaggccgaggcaggcagataacctgaggtcaggagtttgagaccagcctggccaacatggtgaaaccccgtctctagtaaaaatacaaaaattttctgggtatagtggcgctcgtctatagtcccagttactcgggaggctgaaacaggagaattgcttgaccctaggatgtggagcttgcagtgacctgagactcgccaccgcactccagcctgggcaacagagcaagactccatttcaaaataaataaataaactaataaataaataggccaggtgcagtggctcacgcctgtaatcccagcactttgggaggccgaggtgggtggatcacaacgtcaggagttcgagaccagcctggctaacacggtgaaacaccgtctctattaaaaatacaaaaaaattagcccggtgtggtggcacatgcctgtaaacccagctactcgggaggctgaggcaggagaatcacttaaacccgggaggcagaggttacagtgagccaagatcgcaccactgcactccagcctgggctacacagcaagactccatctcaaaaattaaaaaataaataaataaataaacatcaaataaatttttagaaatgggggaggggggtctcgctatattgcccagcctggtcttgaactcctggactcaagcaatcctcccacttcagcttccccaagtgctgggattacaggtgtgagccactgcacccggccatcctttgcttgaactcctccctgtgtctcctctgaccccagttactcactccccataagtctaaatcctatgcaaggagataccccagtaagtctagggctccaaagcagcccccagttgacttccactagtccagctcctactgctgggtgacctcaagcaagtggctcagcctctccaagcctcagtttcctcctctaagaaatggaagtgacagtccccactttgcaacactgtttgacggcttatacttcagcgtttatctccatagctacgggcattgcatgagcactcaacacattattattattgctatttctgttgctatcactgtggcaggctgtggtttctcaagacgggcactgtctaacagaaatacaactcaagccggatgtggtggctcacgcctgtaatcccagcaatctgggaggccgaggcggaaggattgcttgaactcaggaattcaagaccatgggcaacacaacaagacttcctctctatcaaaattcaaaaaaattggccaggcatgctggctcacacctgtaatcctcacactttgggaagcagaagcaggcaaatcacctgaggtcgggagttccagaccagcctgaccaacatggagaaaccccgtctctactaaaaatacaaaaattagaagggcatggtggcgggtgcctgtaatcccagctacttgggaggcgaggcaggagaatcgcttgaacccgggaggtggaggctgcggtgagccgagatcacgccattgcactccagcctgggcaacaaaagcgaaactccgtctcaaaaaaaaaaaaaaattaaccagggatggtggctcacgcctgtaatcccaggactttgggaggccaaggcaggtggatcacttgaagtcaggagttcgagaccagcctggccaacatggtaaaaccccatctctattaaaaatgcaaaaattggccgggtgtggtgacgcacacctatagtcccagctacttgggaggctgaggcaggagacttgcttgaacccaaggttcaagtgaggttgcagtgagccgagatcgcgccactgcactccagcctggtgacagagcgagactccggctcaaaaaaaaaaaaaacaaaaaacaaaaaaggaaaaaaagaaagaaatacaacttgagacacatatatacttttatttatttatttatttacttatttatttttgagatagcatctcactgtgttgcctagcccagtcacaaactcctggactcaagtgctgctctccgctcagcctcccaaagtgctgtgtttacagggaccaaccactgtgccctgccacatatgttattttattttattttactttatttatttattttatatatatatatatatattttttttgagatggagtctcactctttcacccaggctggagtgcagtggtgcgatgttggctcactgcaacctctgcctcccaggttcaagcgattctcctccctcagcctcccacgtagctgggattacaggcacgcaccaccatgcctggctaattttttgtatttttagtagagacaggtttcaccatgttggccaagctggtctttttttttttttttctttttttgagacggagtctcgttctgtcgcccaggctggagtgcaacactgtgatctcagcttacttcaacctccacctcccgggttcacgccattctcctgcctcagcctcccaagtagctgggattacaggcacccgccaccaggcccagctaattttttgtatttttagtagagacggggtttcactatgttggccaggctggtctcaaactcctgaccttgcgatccgccctcctcggcctcccaaagtgctgggattacaggagtgagccaccgcgccccgcctaagctggtcttaaactcctgacctcagatgatctgcccgcctcggccttccaaagtgctgggattacagccctgagccactgtacccagcctacatacgtaatttaaatgtcctgaaaccatgtaaaagaaaatatatgaaatcaattttaataatgtattttattaaaccaagtttatctaaaatataatttcaacatgttaacaacactaaacatttgctttcttttgttctgtctttttttttttttttttgagacagagtctcactttgttgcccaggctggagtgccgtggtgcaatcttggctcactgcaaactccgcctcctgggttcaagtgattctcctgcctcagcctcgcaagcagctgggattacaggcgcccgccaccacgcccagctgatttttgttttgttttgttttgttttgttttttgaggcggagtcttgctctattgcccaggctggagtgcagtggcgcgatctcagctcactgcaagctccacctcccgggttcacgccattctcctgcctcagcctccggagtagctgggactacaggtgcccgcccccacgccaggctaatttttttgtatttttaataaagacggggtttcaccgtgttaaccaggatggtctgcatctcctgacctcatgatccgcccgcctcggcctcccgaagtgctgggattacaggcgtgagccactgtgcccggccctaatttttgtatttttagtagagacggggtttcaccatgttggccaggctggtcttgaactccagacctcaggtgatccgcctgtctcagtcttcgaaagtgctgggattacaggtgtgagacaccttgcccggcctcgttttctgtttttttgtttgtttgtttgttttcctgagacggtcacactgtcactccggctggagcacagtgatacaatcatatctcactgtagcctgaacctcttgggctcgagagatcctcctgtcacagcctccagagtagctgggactactggcttgtgccaccacgcccagctgattttcttattttttaatagagatgggttttcgccatgttgcccatgctggtctcaaactcctgggctcaagtgatcttcccacctcaccatcccaaagtgctgggattccaggcgtgaaccaccgcgcctggccaaaacattcttttttttttttttttggagtctcactctgtcccccaggctggagtgcagtggcgcaatcttggctcactgcaacctctgcctcctgggttcccaccattctcctgccctagcctccctagtagctgggactataggcgcctgccaccatgcccggctaattttttgtatttttagtagagaaggggtttcactgtgttagccaggatggaaaacattcttaatgaaatattttaggccgggcgtggtggctcacgcctggaatcccagcactttgggaggccaaggcaggcagatcataaggtcaggagtttgagaccagcctgccaatatggtgaaaccccgtctctactaaaaatgcaaaagttagtcaggcgtggcggtgggtgcctgtagccccagctacttgggaggctgaggcagaataatcacgtgaacctgggaggcagaggttgcagtgagctgagatcactccatctcaaaaaaaaaaaaagaaatatttttccttgttcccttcctgctatgtctccaaaatccactctgtattttacctttccagcacaacctaatttcagccagtcccatttcaagggctcagagaccacttgtggccattggtgaccatactggacagtgcaggtctgcaggggagtttaactaattgagggggtggcagggagagtgggtgaagactggccagagggtgcagctgtgagactcgaagtttctccaagaaaaagctagggcttccatatggatgagtggataatcactgttttttttttttttctgctgtgcctatcatttaactgaatggaggcaaagcatgtgttggttggtacattcaacaagttctaggttaagcgcctaccttccaggtgctgccggtacagtaaagcacagatgggacaaactcctgcctcctgaggctcacagtggagagggagagattgaaattaagcaactaccaaaggtggatcacttgaggtcaggagttcaagaccagcctggccaacatggcaaaactccgtctctaccaaaaatacaaaaattagccgggcgtggtggtgggcgcctataatttcagctattcgggaggctgaggcaggagaatcacttgaccccgggaggcgcaggttgcagtgagccgagatcgcaccactgcaccccagcctggacgacaagagtgaaactccgtaaaaaaaaaaaaaaaaaaaaaaaaaaaaaccgccgaaacagataaataaatggtaatggtgagaagtatgaggaaggaaaaatgcagggtcctctgaggacattggcaaggagccgggacgggaacgggtgatggaagccatggccagcttccaggccagagacggtggcctacacaagctgagtcagaaaaaatgctcagaggtgctggggtttgattaagtgttagggtgaacctcatggaattgccattttaacaggccaaaaatggtaaaaaaaaattagcaatttcatatgacccaagatagtatctagggcatggaaaggaggggcggggtactatactagttttgaggctcaagggatgacctatgaaccccctaaccgagctttgtttctggagagggggtccgcggcccgcatgagctccctcagtgagcctgcgacccctccgcccccacaagaaccaaaacttgacccggtgcccagagaggttgagtgagtttctcgggtcgcacagctgggagggacgaggggctgagccactgccaagggatcccgctgctctgtctcgctcaccggccgggctatgttgattgtcccctcgcggcgcccggaagcgaccctcagtaaacaaagccgtgtgtgggcgcagccccagaagcctggggcgcgcagtccagcccaagagaggcgggggaggaatgttgtgaatgaaccccgggcccgccccgaaactccgcataaggcctgggccgcgggggtcctcccactctgattggcctctggcgccccgtgattgacagcgcccctcgctgtgcgctctggttgggtaaacaagaaaagactggcatcgcagtcatcgagtgagcagcgaggcttggacacgggtctggcggcgcagccaatggcgggggagggccgaggaggccgagggggggccaatagggacaggcggtgggggcgggacgacggcggagctaaagcggcggctgaagcagcttcattgttgtgaagagtcttaaaggggccgcatcaccctgccggcccggcgcgggtcgggggtgggtgcggtaggggtcccggggcggccgagcgcagaggacggacgggaaggagggcagggggcgcgggagccggcgaagcggagcgggcatcggaccgagccccccaaagaggccccgccccggccctggccccggccgggccggatggaaccccccgcggccaagcggagccggggctgccccgcgggacccgaggagcgcgatgccggggccggggccgcgcgtggccggggccggcccgaggcgctgctggacctcagcgccaagcgggtagccgagagctgggccttcgagcaggtgaccgcgggggaagggggcgggggcagggacgcacccccagcaccttccccacctgtcttctcctcccccacaatccccagactccagagctaacccaatcagagacaccccctgagattccacccccaggacccttaaccctgcctggaaacaccccctcatcctcctgtttctgtccttcaaacccagtaacccacccccatcccttctctgccatctctgcccctcagcgccccagatcccaaatcaggacacttccttcttctcctaccaaccccagatctctgagatctggcccccatggcccgcctacaaccctgggcacccctcttttcccgccttatcccccaacggtacccctcttttcccaccttatcccccaacggtacccctcttttcccaccttatcccccaacggtacccctcttttcctaccgcatctttattcgccaatcagggcaccccattcagtcttcaatcctctcttcggccccccgcttggggacaccctgtctccctccatcgtagcctctagagactcacactaccccattcctgctctccagatccctaccgtacaccccaagtaaataactcccccatctctccagattccagctcaagacaccccttttttccccattcattcctgccctcgagcctccagattccacctgttccttggggacccctctctactcctccagattcctctttcggggctgcccgtcttctcctggcttgccgcagggattactgaaatgccagggtccctcctcctccccacctcatccccctgacctatcctatctcttcccataggaaaacagcaggggcggagcctgggtggtggtccctggacaggtgcacctagaagctctcttctgtggcttctggtggcactgacaggatgtcccagagctggggccctttaagtcccctttttcagcttcagtgtgggcccccaaggaactggagacatggcccagacttgaacaggaagcacacacgggctctatcctctgtccagcttcagggggcgttctttcctgcccggcctctctggagttaggaagtcggcctggacggatgggtttgggccaagtgtggatgggcaggctctgattcatggactggaaaatccctccttagtcatttgccaactgtccctgaggcctgggctggtcattgcctctcccacttcccctagaaacccaggtggagtaggggctaaggagggccccttcattgcatgtgagacacacagaacaatctgaaaaccatctccgagcctcccacaaacctgccctggccaagccgagccctcagagttcttgacccacagaagctcatggaatcccctgcaaccctttggcagttgttcttgttcccactttgaggaaactggggcacagagaagttgagaaacttgcccaaggtcacccagccagggaatagcaagtccagattggaaggcaggctcagccagctcactgtattgcccagagcccacagcggtggccaggacaccccctcccctcctggggccccttcccagggatggggcatggaagggaaactgaggaacgacagagtctgtcttaggagttgaaacaactcacagctctgggaccctgaacaagtgaattcatcccactaagtctcagattctcccagctataaaacaggttcatgatttagtatcaatgtgccatcaagggtgttcaatcttttagcttccctaggccacactggaagaagaactgtcttgggccacatataaaatgcactaacactaacaatagctgatgagcttaaaaagaaaagaaaagaaaatctttgtatttatttatttatttatttatctgaaacgagtctcagtctgttgccaaggctggagtgcagtggcacgatctcggctcactgtagcctccacctcctgggttcaagcaattctcccgcctcagcctcctgagtagctgggactacaggtgtgagccgccatacccagctaatttttgtatatttagtagagatggggtttcaccatgttggccaggctggtttcaaactcctgacctcaagtgatcctcccaccttggcctccctcccaaagtgttggaattacaggcatgagccaccgcacccggacgtatcttataatgttttaagaaagcttacgaatttgtgttggcctgcattcaaagctctcctgggccagggccgtggggcgtgggttggacaagctcacactaggtggctgtgagaatttggaaattacatacataaagtgttcagcatagtgtgtgcattcttttcttttcttttcttttttcttttcttttgaggcagagccttgctcagtagcccagtgaaacaatgattgcgcaatgacacaatcataactcactgcagcctcaaactcctgggctcaagcaatcctcctgcctcagcctcttgagtagctgggattccagacgcccaccaccacacctggctaatttttaattctgtgtgtgtgtgtgtagacatggggtctcactatgttgctcacgctggtctggaacgcctgagctcaggcaatgctgccgcctcagcctcccaaagtgctgagattacaggtgtccagccaagatgggcaccttaatcattattatcacttttttctaacttcttcctgctccaccaaagcctggtgggtgggaagatctcacaacagaatcccaagaccctgcagctaggaggatccaggagggaaaccgcaagaaagttctagaatgctaactatgggccaggtgttattgtaagttctttaagctctttacatccatactgcatatttagtctccacaatcctcaagaggttggtgccgtggacctccccactttacacctgagaatactgaggccaagtgacttgcctggggtcacagtgctcctaaatagtaaagctaggattcaagcctcggtttctctgtttttttatttttatttatttatttgagacggagtctcgctccgtggcccagactggagtgcaatggcgcaatctcggctcactgcaacctccgcctcccgggttcaagtggttctcgcgcctcagcctcccaagtagctgagattataggtgcatgccaccacacctggctaatttttgtatttttagtagagacggggtttcgccatgttggccaggctgctctcgaactcctggactcaagtgcaccaactgccttggcctcccaaaatgctagaattgcaggcatgagccactgccctgacctattttttttgagatgggatcttgctctgttgcccaggctggagtgccgctggtgcaatcatggctcactgcagcctcaaactcatggcctcaagtgaccctcctgccccaccctcccaggtagctgggattccagatgcatgccaccatgcctggctaattttttttatttttttatttttttatcttttttttttttttttcgagatgcagtcttgctctgtcacccaggctggagtgcagtggcatgatctcagctcactgcagcctctgccttccaggttccagcgattttcctgcctcagcctcccgagcagctgggactacaggtgctcaccaccacacccggctaattttttttatctttagtagagatggggtttcatcatgttggccaggctggtcttgaactcctgacctcaggtgatctgcctgcctcggcctcccaaaaatcctgggattacaggcgtgagccatcgtgcccggccagtttttttgtaaagatgggagcctctctatgttgcccaggctggtctcgaactcttggcctcaagcgatcctccctcctaagcttcccaaagcgctgggattacatcaaccccaggctcctaacccactggcccttcctacaggtggaggagcggttctcccgggtgcctgagcccgtccagaagcgcatcgtgttttggtcgtttccacgcagtgaacgggaaatatgtatgtactcgtcgctgggttacccgcccccagagggcgagcacgatgcccgggtgccctttacccgcgggctgcacctgctccagagcggggccgtggaccgcgtgttgcaagtgggtgagtctttgtcccccactcctgctggggaggccaggaggtccataccaggcctggaaatgggggagttggagggaggcctggggccaggggatgggaggttacagacctcaggcttcgaggcccagataggattgtacaagattttttttttttttttttttgagacggagtctcgctctttggcccaggccggagtgcagtggcgcgatctcggctcactgcaagctccgcctcctgggttcacgccattctgcctcagcctcccgagtagctgggattacaggcgcccgccaccgcgcccagctaattttttgtatttctttttttttttttttttttttttttttttttttttttttgagacggagtctcgctttttcgcccaggccggagtgcagtggcgcgatctcggctcactgcaagctccgcctcccgggttcacgccattctcctgcctcagcctcccaagtagccgggactacaggcgcccgccaccaagcccggctaattttttgtatttttagtagagacggggtttcaccatgttagccaggatggtctcgatctcctgacctcgtgatccacccgcctcggcctcccaaagtgctgggattacaggcgtgagccaccgctcccggccccattttttgtattttgtatttttagtagagatggggttttactgtgttagccgggatggtctcgatctcctgacctcgtgatccccccacctcggcctcccaaagtgctgggattacaggcatgagccaccacacccagcctgtacacgatgttttgagcaaaagctcaaggatcaccctagaacccaggcagcagggtttagacaaggggttgggggagaggatggtgaaccagaaacaggggaggagagatcccagaacttacacatcagagcccatgtaaaggaggggtgaggccagatgtggtggttcacacctgtgatctcaacactttgggaggccaaggcaggaagatcacttgaggccaagagttcaagaccagcctgggcaacacaatgagaccttgtcttcacaaaaaaatcaaaaaatgagctgggcatggtggcgggtgcctgtggtcccaggtacatgggaggccaaggcaggaggatcgcttttgcccgagaggtcgagcctgcagtaagctatgattgcaccaccgtactccagcctgggttacagagcgagatgctatctcaaagagaaaaaagaaaaaaaaaaaggaagagaggtgagggccactctagggacaagggtagaggttgagacatggtggtgaaggtgccagacctcaggcttcaggtccagatggggttgggttcgggattatgagctgaaggtggaaagtgctcctagagccctagacctcaggctgctgagctggggaatggggaatgaagtagtgagacggagagaagagcaggtcccagctgaggatcagagaagcagctgtcagccagcagtgagaggaggctccagacctcgggctgagggacccagtgatgctttgggccaggggtttagagccagaggtaagaatgatcctagacctcaggcagtggggcccacgtgggagttggacacaaagatttagagccacaggtgagagtcttagacctcaggcagagaggctgggatttcaaaggcttagagctattgttgagcaatggtcttagacctaaggcaacagggctgaggtgggaatgtagagtagaagtttagaattcttttttttttttttttccgagatggagtcttgctctgttgcccaggctggagtgcagtggcacgatctcagctcactgcaacctccacctcccaggttcaaggaatacccctgcctcggcctccctagtagctgggactacaggcacccgctatcatgcctggctaatttttgtatttttgtagagacagggtttcaccatgttggccaggctggtcttgaactcctgacctcgtgatccacccgcctcagcctcccaaagtgctgggattacaggtgtgagccaccatgcccagcttagaattttttttttttttttttttgagatggagtctcactctgttgcccaggctggagtgcagtggcacaatctcggcttactgcaacctccacttcctgggttcacaccattctcctgcctcagcctcccaagtagctgggactacaggcacctgccaccacacccagctaattttttctattttttagtagagacggcgtttcaccgtgttagccaggatagtctcgatctcctgacctagtgatccgcccgcctcagcctcctacagtgctgggattacaggcatgagccaccacgcctggccaaatttttttttttaagagatagagtctcggccgggcacagtggctcacacctgtaatcccagcactttgggggctgaggcgggtggatcacctaaggtcaggagttcagcctggccaacatggtgaaaccccgtctctactaaagatacaaaaattagccaggtgtggtggcacatgcctgtaatcccagctacttgagaggctgaggcaggagaatcagttgaacccgggaggcagaggttgcagtgagccaagatcatgtcattgctctccagcctgggcaagagagagagactctgtctcaaaagaaaaaaaaaagggagatagggtctcactctgttgcccaggctggagtgcagtggcgcgataatagctcactgcagccacaaacatctgagctcaagtgatcctcccacctcagcctcccaagtagttggtaccacaggcgcaggccaccacacttgactagtttttaagttttttgtagagacctggtctcactctgttgcccaggctggtctcgaactcctgggctcaagagatcctcctgccacagcctcccaaagcactgggattacaggcgtgacccaccatgcctggccaagtatcaggttaagatcagctgtgaagggtgggctcagacctcaagctaagaaaacaaaagggctgcagagactgggagagatgtaatgagaatagtggaaaggccttggatctcaggcagccagactcagaaagggaccagtagaggctgagccagaaaacaaaagtgaggcctgggactccagacctctggctgcagcaggccatttctcccagctagaggtcggggctgggctgatatgatgccccgtcggctctatctgctttggagcccctttgctgggacatggccccgctgaccacgggctccttgccacctccagctggtatgaggaagccatctccctgcatgacccaggctgggcctgagctgccgaaccagtcagatgagcctggcacctgggctgcccagggaggggcagggggagtgaaggggacacctggcccctggcttacttcatcagcccctcgccccaagcgccacgggtctttggcattttctcaggaaattgaggggctcctgaagccctggccatattcattgtaacccaaggaatcagaaaaccaccttcaatgtcatggtatgatactattcataattaaaataagagcaagtgttgggctgggctcggtggctcgcgcctataatcccagcactttgggaggccgaggcgggtggatcactaggtcaggagttcaagactacactaggtcaggagttcaagactagcctggccaatatggtgaaacctgatctctactaaaaatacaaaagattagccgggcatggtggtgcacgcctgtaatcccagctacacaggaagctgaggtaggagaatcgcttgaacccaggaggcggaggttgcagtgagtcaagatagcgccactgcactccagcctgggtgacagagcaagactctgtctcagaaaaaaaaaaaaaaaaaagcaagtgtttacttaggacttaacttcataccaacagcgttctaagcctttttttgagacagagtctcattctgttacccaggctggagtgcaatggtgcgatctcagctcactgcaacctctgcctcccgggttcaagccattctcctgcctcagcctcctgagtagctgggattacaggcgcccgccaccatgcccggctaatttttttatatttttagtagagacagggtttcaccatgttggccatgctggtcttgaactccggacctcaggtgatctaccagcctcggcctcccaaagtgctgggattacaggcatgagccactgcgccgggctgtctcttctaaaaatacaaaaattaggctgggcaccgtggcccacgcctgtaatccctgcactttgggaggctgaggcaggcggatcacctgaggccaggagttcaaaatcagcctgaccaacatggagaaaccccatctctactaaaaatacaaaattagccgggcatggtggcgcatgcctgtaatcccagctactcgggaagctgaggcaggagaatcacttgaacctgggaggtggaggttgcggtgagccgagatcacaccattgcactcctgcctgggcaacagagcaaagctctgtcccaaataaataaataaataaataaataaaattagccgggcatggtggtgtgtgcctgtaatcccagttacttgggaggctgaagcaggagaatcgcttgaacctgggaggcggaggttgcagtgagcccaggtcgcagcactacactccagcctgggccacagagcgagattttgtttcaaaaaaaaaaaaaatgcaaagtgagtgaggtgacttgtgctagtgaagtgactcggctgggctttgcaaccgggtcttgctgtgtaccacaaacaccgcctgtctctgggatgacacggatgcgacagtttggctttgatcctaggattccacctgagcggaaacatccgcgagccagggagtcctggagagcccgagcgcctctaccatgtctccatcagctttgatcgctgcaagatcacgtccgtgagctgcggctgtgacaaccgcgacctcttctactgtgcccacgtggtggccctgtccctgtaccgcattcggcacgcccaccaggtggagctgcggctgcccatctccgagacgctctcccagatgaaccgggaccagctgcagaagttcgtgcagtacctcatcagcgcccatcacactgaggtgctgcccactgctcagcgcttggctgatgagatcctcctgctgggctccgagatcaacttggtgaatggtaagggcaccccgggggtccggtggggagaggatgcccaagcgcacagccacgccacttgctgtgtgcccagtgctggtcacttactgacagaaagttgtgggggcggggggcggaaaacgcgccatggcctgcatcatctgaggtcacccacctggtgagtggcagatcccagatatctggacacaggacagatgagtagttgcaaatcagcctacgggcagagggcgagggcaggaggggagatcctgcgttagagggcaagtgggaggtctggccccagggctgggtatgtcaatagatggagcatcctgggtatgggaggagaagagggggcgtgaagggaatgtgggacgtttgtgggtgtcagaggtgttatgggtgaggggatacaccaggaggcgtggtgagggctgggagggtttggggggctccgaggggcttgggttgcctagctaggatggggaaggtgagtagtaggtggaggcatggatggatgatggagggaggtgctgggtgggtacagaaagtgttcgtgattggctgggcgcaggggctcacacctgtaatcccagcactttgggaggccgaggtgggcggatcagttgaggtcaggagttcaagaccagcctggacaacatggcaaaaccccatctctaccaaaatataaaaattagccgggcgtggtggtgggtgcctgtagtcccagccactcaggaagctgaggtgggagaatgggttgaacccgggaggcagaggttgcagtgagctgacatcgcgccattgcactccagcctgggagacaaagtgagaccctgactccaaaaaaaaaaaaagcgttcatgatcagtcactgagggcaactgatggtgtggaaaaacgaatgggtgggtgggggatatttttttttttgagatggagtcttcctctgtcacccaagctggagtgcagtggtgcaatctcagctcactgcaacctctgcctcctgggttcaagcaattctcctgtctcagcctcctgagtagctgggattacagatgcacaccatcatgcccggctaatttttgtatttttgtagagacaggggtttccccatgttggccaggctggtcttgaacttctgacctcaggtgatccacctgcctcagcctcccaaagtcctgggattacaggtgtgagccaccacacccagcctggacgggatattaacaatgccgttaggtgaatgggaattggaagctgagtgtggtggctcatacctataatcccagcatttgggaggctgaggaaggaggatcactcgagaccagcagttcaagaccggcctgggcaaaatagggagacctcctctctacaaaaaataaacaaaagtagttgggcatgatggcacacacacgcctgtagatacttgggaagctgagatgggaggatcatgagcgtgggaggtaaaggctgcagtcagctatgatcgtgctactacactccaacctgatgacagactgagaccctgactcaaaaaacaaaaaaaaaaaaagaagggaaggacagaactggtggtgattggaggtgaggatgagtggttgggtggggagggctttgactagtggagttaaggtagactgacagtggtggacagatgaagttagtgaaagaatgaaagatccaatgggtacatgcattgggagtgagttgatgggtgaatggaaggaaggttcacatatgtggatcaacatcgtgggtgggcagagtgggtgggcgctttgtgtagggtggatggatggacgaatggggtagtgggtgttttgagaggtacatatgaatggatggtttgataatgaatgggtggtttaatggaagcatagagagttaggattagttattgggtgataactaatagttatcacctagataactagggttagttattggatgatagttactgggtggggtggatagtgtacttgtgtgggtcaatggacaaatgggcgggtgggtattttgagtggttagttcacgtggattggaaagataaaaggggtgagtgggcagatagatcaataagatgagtatatagatgggtggatgggtgggaattatgggtagggtggatgatggacccatgatggggtaggtggttgtttaaagggtatggacatgtggatgaagtgaaatgggggatatggccaggtagatagaggctggcatgacttgggtgggggtggataagtgggttgtgtttcaggtgagacagatgagtaaacagatgggtcggtggtgttttgagtgggatgggtaaatggatgagtggatgggtagatggatagatgtgtagtgtttcaggagagatagatgaatggattggatgggtaagtaaatggatgaatgaacaaatggatgaatgagctcctggtgttttgggcaagatggatggatggatggatggatggatggatggatggatggatggatgaatattactacaggggagatagatggattggatggatgactcagtggataaatgagcaaatggatgagctggtggcgttttggacaagatggatggatgcatggatggatggacagatggatgcatggatggatgcatggatggatggatggatggatggatggatggatggatgggtgtatgggtgtatgggtgtgttgtgtttcaggtaagatagatgaatggattggatgggtgatgtattactctgttctcacactgctataaagacatacctgaaacaggttaatttaaaggaaacaggtttaatcggctcatagttctgcaagctacacaggcttctgcatttggggaggcctcaggaaacttacaatcatggcggaaggtgaaggagaagcaaacacatcttcacatggctgtcaggagagagagagcgaagggggagacactacacactttcaaacaaccagatctcatgagaactctatcatgagacaacactaagggaatggtgctacaccattagaaaccatccccatgatccagtcacctccctccatgccccacttccaactctggggatcataattcaacatgagatttgggtggagacacagagccaaaccatatcagatgactaagtggatgaatgagaaaatggatgcatgagctagtcatgtttaggacaagatagatggattgatggagggatggatggatggataaacatgaatagatggtcgggtgggatggacaagcagatgggtgggtggggtttaggtgggatggatggaactttagactgggttgggtgacttggaagaatggatggatgggtcgggcacagtagcttatgcctgtaatcccagcactttgggaggccaaggcgggtggatcacctgaggtcaggagtttgagaccagcctgaccaacatggtgaaatcccgcctgtactaaaaatacaaaaaaaattggcaaagtgtagtggggcgtgcctgtaatcccagctacttgggaggctaaggcaggagaatcacttgaacccgggaggcagaggttgtagtgagcgaagatcgtgctacagcactccagcctgggcaagaagagccaaactccgtctccaaaaaaaaaaaaaaaaaaaaaggacagctctcctcaacccaacccaaccccaactccagccccagcctcagcttcctttccctccctcccggcaggtgccccagaccccaccgccggcgcaggaatcgaggacgccaactgctggcacctggacgaggagcagatccaggagcaggtgaagcagctactgtccaatggcggctactacggggccagccagcagctgcgctccatgttcagcaaggtgccgtgcgggccggcggggcgcggggtgcagaaggccccggcggacgccccagcccttcctcaccaccctgtccccggcacaggtgcgggagatgctgcgaatgcgggactccaacggggcgcgcatgctgattctcatgaccgagcagttcctgcaggacacgcgcctggccctgtggcggcagcagggcgcgggcatgacggacaagtgccggcagctctgggatgagctgggtgaggcccaaaccccggtgcgtggtggacaccgggacttcggctcccatgggggctggcccactccaagattagggtctgttccctgaatccgccctccattcgtttggcaaacatttatgagcgcctctaaagtgccaggcatggtactgggcactggtggtccggcagagaacaagagagtcaaaatcctgttcacgtggatctgacaggaggcacaggcaatcaaatgtcattggcccaggggttgatacacacgtacacacgttttctttgttttgagacagggtatcactctgttgcccaggctggcgtgcagtggcacaatctcggctgactgcaacctctgcctcccggactcaagtgatcctacacctcagcctcccaagtagctgggtctacaggtgcacactaccacatccagctaatttttaattttttgaagagacagagtctcactatcttgccaagtctggtcttgaactcctggactcaagcagtcctctcacccagcctcccaaagtactgagatgacatgcatgagccaccacacccagcctacatgttttgtttctttttttctttttttagagacaggatctcactgtgcgcccaggctgaagtacagtggcacagtcacggctcactgtaacttcaaactcttgggctcaagtgatcctctggccttggcctctcaaagtgctgggatgacaggcatgagccactgtaccaagctgacatatttttgtttgtttgttttcttttcttttctttttttttttttgagaaggagtctcgctctgtcatccaggctggagtgctggagtgcagtggtactatcttggctcactgcaagctccgccctccgggttcacaccattctcctgcctcagcctccctagtagctgggactacaggcacccgccactaagtccggctaattttttgtattttttttattagagacggggtttcactgtgttaggcagggttgtcttgatctcctgaccttgtgatctacccgcctcagcctcccagagtgctgggattacaggtgtgagccacggcacctggcctgttttctttttttgacacggactctcaccctgtctcccaggctggagtgcagtggcacgatctcggctcactgcaacctccacctcctgggttcaaatgattctcctgccttagccttctcagtagctgggattataggtgcgtgccaccatgcctagctaattattgtatttttagtagagacggagtttcaccatgttgatcaggctggtctcgaactcctgtcttcgtgatccacccgcctcagcctcccaaagtgctgggattacaggcgtgagccaccacacccagccaacatatgttttcttttttcttttttcttttttttttgagacggagtcttgctctgtcacccaagctggagtgcagtggcacaatctcagctcactgcaagctctgcctcctgggttcatgccattctcctgcctcagcctcccgagtagctgggactacagaggcccaccaccacgcccggctaatttttttgtatttttagtagcaacggggtttcactgggttaaccaggatggtctcgatcccctgacctcatgatccgcccgcctcggcttcccaaagggttgggattacaggcgtgagccaccacgcccagccttttttttttttttttttttttgagatggagtcttgctttgtcacccaggctgtagtgcagtggcacgatctcggctcactgcaagctccgccccccaggttcacgctgttctcctgcctcagcctcccgagtagctgggatcacaggcgcctgccaccacgcccggctaattttttgtatttttagtagagatggggtttcaccgtgttagccaggatggtctcgatctcctgacctcgtgatccgcctgcctaggcctcccaaagtgctgggattacaggcatgagccaccgcaccggccaacatgtgttttctgtaagagacacagagttaatgttattcagccctgcaggccatctggtctctgtcatgaagacctcactctgtctattatagtaaaaaaggcagacacagacatatataccaaacgggcatggtagcatttcaataaaactttatttaagagctgggaggccaggtgcagtggctcacacctgtaatcccagcactttgcggggctgaggtagggggatcacttgggccccggaggttgaggctgcagtgagccatgatcacaccactgcactccagcccgggcaacagagcaagaccctgtctcaacaacaacaaaaaaaggcgcttggcacagtggcaggagcctgtactccctactacttggaaggctgagtgaggcaggaggattgcttgagcccaggagttcgagtgcagcttagacgacatgatgagaccctgtctctaaattttttaaaaaccggctttatttatagatacttactaatttatttgaattttatattattcccacaagttgcaaaatattcttttggttgtatttccctgaccatttaaaactggaaaaataggccgggtgcagtggctcacaccttaattccagcagtttgggaggccgaggtgggcagatcacttgaggtcaggagatcgagaccagcttggccaacatggtgaaaccccgcctttactaaaaatgcaaaaattagccaggcattgtggcggacgcctgtaatcccagctacttgggaggctgaggcaggagaatcgcttgaacccaggaggtggaggttacagtgagctgagattgcgccactgcactccagcctgggtgacagagtgagactctgtctcaaaaaataaataaataaaaacaagtacaaataaaaagggaaaaataaatcttagcgtgcaggctaatcaaaaataaagggtggttcagttttcaccatgggcagtggtttgctagttcgcagacccctgcatgagatggtgataaatgctacccaaaaaaccccaaaacaccttgagaggagtctggaggcctggtttttttgtttgtttgtttttgtttttgttttgttttgttttgagatcgagtctcactctgttgcccaggctggagtacagtggtgtgatctcggctcactgcaacctctgcctcctgggttgaagcgattcttgtgcctcagcctcccaagtagctaggactacagaggcccgggatgtaatcccaacttttttttttttttttttgagatggagttttgctctttttacccaggctggagtgcagtggtgtgatctcagctccctgcaacctccacctcccgggttcgagccattctcctgcctcagcctcctgaatagctgggattacaggcacccacaatcatgcctggctttttttttttttttttggtattttcagtagagacagggcttcaccctgttggccaggctgttcttaaactcctgacctcaggtgatccgcctgcctcagccttccagagtgctgggattacaggcgtgagtcatcacgcctgaccctctaatcccaacttctaacttaccagcggtgtgaccctgtgcaagccgtgttatgtctctgtgcctcagtttgcttgtctgtaaggtgcaaaggctgcgagttgcaacttccgagggtcgaggtgaggggttagcagatcatcaggtggcacacagtgggcactgcggaagtgtgtgttgctgccactgttggcaggaatattgagcctgccccgtgcctcctcaggggccctgtgggtttgcgtcgtcctgagcccccactgcaaaccagaggaaagggcaggctggctccagctactcagcaggtgggacaagctcgacgtctgcccactggaagagggcaactactccttcgacggccccagcctgcagcccaccatggcccccgccccaggtaggagagaggggtctttaccatgccccccaaaaaccatcaccactaactgtggccccacttaccatcatggtcctcttcccaggagagagagggagtggggcagagcaaagcagaccccagtccttggctgttcttccaggactaatcccaacttgtctagccaggaaagagcgagtgccaagggcaggagcaatggcagcccaagtgggcaagtgaagtaaaatgcttaaaacacctgcagtcctgggctggtctggcttggccttctgctagctatgggaccaaagagaggatgagagaggaaaaaaggaggaatcaaacagaaggggaaagtgagatattgaggagagagaaacaagtgaagagaggcagagatggatggagagagggagaggcagacagaggagcagataggaaggaagacagagagagattgaggagagagggaaaaaaaaatttatagcaagtacaggccaggcatggtgtctcacgcctgtaatcccagcactttgggaagctgaggggggcagattgcttgaggccaggagttcaagaccagccagagtaacatggtgagaccttgtctctacaaaaaatacaaaaattagctgggtgttgtgacgcacacctggaatcccggatactcagggggctgagatgggagaatcgcttgagcctgggaggcggaggttgcagtgagccaagatcgcaccactgcactctagcctggacgacagagtgagaccctgtctcaaaaaaaaaaaaaaagaaagaaagaaagaaaagaaaaatagcaagtaggaagaggaagacagacagccagttagttgctcaacctcagtttcctatcaatgtgatgggcctgtactagctcctaacacatacacgcatccttttttttttttttttgagacagtctcactctgatgcccaggctggagtgcagtgacgcaaccttggctcactgcaacctctgcctcctgggttcaagcgattctcattcctcagcctcccaagtagctgggattacaggtgtgcaccaccacgccagggttaattttagtagagatggggtgtcgccatgttggccaggctggtctcgaactcctggcctcatgtgatcctcccaccttggcctcccaaagtgctgggattacaagtgtaagccaccatgcccagcctacacatgcatctttgaagggtggcttcaaggactgggcagatgatgtatgcccatagctttgcccaggcctaaaccccagttagtacttggtgggaaaagctggacacggctcaactgctatagggaccccccctcactgagccatgttgggtgcctctctgcaggctcggaggaagaggaagaggtggcagccacaagtccccgccacacggtatttggccgcgccttgctggctggagagctacactggaatgacgcctacctgcagaggatcctggccagtgactcctacgggcccagcctcacaggcagcgtgggtggggacaaaccgactttcgacccccagggccgcccactgtggctgggagaacctttccccactgcctgtgcccgtgtggacaccctgcgtgcccacggatacccccgccaggccctgcggctggcaagtgccatcatcaacacactccggctgcagcagcggcatcagctagagagctacaagcagcagaaaaaaggtcagcctcagccgggcacgggggctcgcacctgtgatcccagcacattgggagtccgaggtgggaggattgcttgaggccaggagttcaacatcagcctgggcaacatagtgagacaatgtctctacaaaaattaaaaaaaaaaaattagctggatgtggtggctcacacctgtagtcccagctactctgtaggctgaggcaggaggatcacttgagcccaggagttcaaggctgcagtgagctataattatgccactgcactctagcctgggtgacagagcaagacctcatctctttttttttttgagacagagtttcgctcttgttgcccaggttggagtgcaatggagcaatctcggctcaccgcaacctccacctcccaggttcaagggattctcctgcctcagcctcccaagtagctgggattacaggcatgcgccaccatgcccggctaatttttttgtatttttagtagagatggggtttctccattggtgagactggtctcgaactcccaacctcaggtgatctgcctgccttggcctcccaaagtgctgggattacaggcttgagccaccgtgcctggaaattttttttttttttttttttttttttttttttgagatggagtctcggtctttcgcccagtctggagtgcagtggcgcaatctcagcttactgcaacctctgcctcccaggttcaagcaattctccggcctcagcctcctgagtagcttgggactacaggcacccaccaccacacccagttaatttttgtgtttttagtagagatggggtttcactatgttggccaggctcttctcgaactcctgaccttttgatccacccacctcagcctcccaaagtgctgggattacaggtgtaagccaccgtgcctggcctactgaaaatatttttaaaattagccaggcgtggtggcgcacacctgtatttccagctactagggaggctgcggcatgagaattgctttaatctgggaggcagaggttggttgcagtgagccaagattacaccactgcactctagactgggtgacagagcgagactccgtctcaaaaaattaaaaaaaaaaaaagagagagagaggagagcgaggagagagagaagaggaaagaaagaggtggggagggagggacagagagagatggggggagagagaggggaaggaaggaagggagggagggaaggaggctgtatgagccccaaaaaccacattgtgtactagatatgggggtgggggacaggagggaggccaccagttgagagagctagtcgatggggttgatggatcagctatcaggaaattgaacgaagaaaagtgtgtcgtggaggaaacatgggggccctgggacccgagcagagctctgaccaggcttggcagcatcagtgaaaggcccctagattttaaaaattagccaggtggctaattagctgagtatttaaggatgtgcatggccaggcacagtggctcacacctgtaatcccaacactttgggaggtggaggcaggtggagtgcctgaggtcaggagttcaaaaccagcctggccaacatagtgaaaccccatctctactaaaaatccaaaacaaattagccaggtgtggtggcacgtacctgtattcccagctactcaggacactgaggcaggagaatcccttgaaccgggaggtacctggaggttgtggtgagctgagatcacgccattgcactctagtctgggcaacaagagcaaaactccatctcagaaaaaatttaaaaaaagaaaaaggatgtgcaggagttacccaggagaaggggatggaggaagtgctcagaatagaaggaacaccatgagcagcagccaggagggaagagagtacgtggcttggaggacgaggctggaggattggcctccagatgaggcaggtcaccagtatatggaaaaacttcatactggtccttgggggccctaaaggctgttggggctttatcttcagagaggtggagagggaataagggcaatgaggaggggaatgacacttcgggtgttttagaaagcgtccagtggccaggcatggtggcccatgcctgtaatccctttgggaggccgaagcaggaggatcgcttgagctccagaggctgcagtgagctatgattgggccactgcactccagcctgggcaataagcgagaccccacctcaaaaaaaaaagttgaaggtgaccattgggtgagcaggtggtgggcattatggggctaggctggctggcaggtcaagaagaggaatatccctccctcctagagacttgggcaggtgtgtgggcattgagccccctctttccacctgcagagctgctccagaagggctccacctgcatcaccaacaccgaaggatgggtggggcaccccctggaccccattggctgcctctgcagggcgctcctggaggcctgtcgtctggaggaggagacacttaccctttacccaggtactcacatggggtactcttggaggaggtgggacaaccccgcctcgttggccacgccccctggcccagtacccctataaggtaactcccagactctgacccttggccacgcccctacccttggctacctcctctggccagtgcccagagccaataggcttagcttctcctgaaagtgaggccaccataggcctagctgctgctagaaggtggggctcccgcgctcccccaaccccgtgagtgctgggagcttctgggctccctctaaagcctaccctgcgcccaggtctccatgcttgaggccaagggctacagggaccttagggaaggggatccgtctccagcagccctggccctgtctcccccagactcaggccccgagaagcggaaggtggcctaccagcacgtgcctgtgcccgggagccctggggagtcctacttggtgctggcgctggaggtggcactgctggggctggggcagcagcgggccctgccggaggggctgtacgcccaggacaaggtggtgcgcaacgaggagcagctgctggccctgctggaggaggtggagttggatgagcggttggtgcaggtgctgcgcaagcaggcggggctgctgctggaaggtgaggccgcgcccctaggcctggctgttgctgaagggtagggtccagcccctggtcctgtagcggcccggttgctgccagatgggaggccccgccccagccccgcccctagccccgcctcctggtgatactgtcccctcataccttggcagtttctaaaaggagagagccagctctttttcccgccacctagtgcgtgctgccagccagcaactgctgcgtgtgctgaggcgccgcccccttccctcccgggagccagtgagccaagtggttgatgttaaagcgagggcgtcccaccttcatccgcaacttagacaccgcccctgtcccggcctgctcctcattggccccgccaatggccaggccctattgacctgtgtgttgtgagactccgtcccctagcgctacagggagccgtttatccctgccccttcaaggccccctacgctatcggacttgctggtcttggccgctggtcccgttccccaaggcaggtgcagccccacctccaccctctggccccaccttgtatctgagtcctgctcctcacctgcgagtgtgcctggagtctcttcttttccttttccttttttccttttttattttgcgacagtcttcactctgtcacccaggctggagtgcagtggcgcgatctcggctcactgcaatctctgcctcccgggttcaagtgattcttctgcctcagcctcccgagtagctgggattacaggcgtgcgccaccacacccggctgatttttgtatttttagtagagatggggtttccccatgttggccaggctggtctcaaactcctgacctcaagtgatctgcccgcctcggcctcccaaagtgctgggattacaggcatgagccgtggtcccctgcctcctctttttttttttttgagacggagtctcgctctgtctcccaggttggagtgcagtggcgcaatctcggctcactgcaccctccgatcccgggttcacgccattctcctgcctcagcctcccgagtagctgggactacttgcgcctgccaccacacctggctaattttttttgtatttttagtagagacggggtttcaccgtgttagccaggatggtctcgaactcctaacctcgtgatccgccagcctcggcctcccaaagtgctgggattacaggcgtgagccaccgcgccaggcctcctcttttatttggattacccagagattgcctcagtctcagacctgaacccctaccccagagacccatctagccacagccactctacccaggggccagcccaccctctacttaaagcctggggtctagtgagacctggggaagggcagaggcgagcccacacttggggactgagctcaggctgttcctgcagggggtcccttcagtggctttggggaggtgctgttccgggagagcgtgcccatgcacacctgtgcccgctacctgttcaccgcactgctgcctcatgacccggacctggcctatcgcctcgcgctgcgagctatgaggtgaggataggtggccaaggcagtggcagggggagctggggggaagaggggcgggcatggggggtagctcagagccccacccatccagcctgaactcacagcctagttaattcagtctctctcaccctggcatttgatgatgccatgtgcttttcattattattatttatttatttatttatttatttatttattttgagctggagtcctctgtgacccaggctggagtgcagtggcgcgatctcagctcactgcaacctccacctcctgggttcaagcaatttcctgcctcagcctcccgagtggctaggattacaggcatgcaccaccatgcccagctaatttttgttttttgttttttttttttttgagacggagtcttgctctgtcacccaggctggagtgcagtggcgcgatctcggcccactcccagggccgatctcagctccgccttccaggttcacaccattctcctgcctcagcctcctgagtagctgggaccacaggcgcccgccaccacgcccggctaattttttgtatttttagtagagacggggtttcaccgtgttagtaatttttgtatttttaatagagacaggatttcgccatgttgcccatgttgtctcgaactcctgacctcatgatccacccgccttggcctcccaaagtgctaggattacaggcataagccacctcgcacagccgtgctttttattattaagtataaatgtgtgttttttgttttgtgttttttttgttttgagacagggtctggctctgtcacccaggccagagtaaagtggtgccatctctgctcagtgcaacctctgcctcccaggctcaagcgatcctcccatctcagcctcctgagtatccaggactccaggcgtgcaccaccgcactgggctaatttttgtattttttgtagagacggggtttcaccatgttgctcaggctggtctcgaatttctgagctcaagtgatccgcccaccttggctttccaaagctctgggattacaggcgtgagccactgcacctggctaaatgtgtaatattattttgagtttgagaatattcacatgatacatgaaaagatacacaaagctgaaatcttttctaggcagttttatctcagcctatccagatctctccggatgcaagcagggttatcacttttgtgtctatcctgcaagaattgaggtttctgcaaacccataatctggaaattgaacgttgatcctccttttataccagtggtacatcctgtatctattctttgcacctttttctcactgagctttgcatcttacaggatttgtcttatcacacagtacgtgaatcactgcgtagccttccactctaaggacacgtcataaaagaaccacttggaagctgatagacatttacgcaatttccaaaaaaaaaaaaaaaaggcaatgaataacctggttttcatttatcacgtacaccagcagattcacagaaggagaatatttgaaagccaacttggccgggcatggtggctcatgcctgtaatcccagcactttgggaggccaaggcggacggatcacctgaggtcatgagtttgagaccagcctggccaacatagtgaaaacctatctctactaaaaatacaaaaattagctgggtgtggaggtgcatacctgtaatcccagctactccggaggctgagacaggagaatgacttaaacccgggaggtggaggttgcaatgagcccagatcgcaccactgcactccagcctgggagacagagcgagactctgtctccaaaaaaaaaaaaaaggccaactcaatagtaaaccatgcccaaaaaggtgcaacctattccacaccttctgaaaccatccttcagaggtacctataaacaacttgggatccagcctggtacacatctatggtcctagctacttgggaggctgaggagggaggattgcttgagcccaggaattcaaggctgtagtgatctatgatcccacctatgaattgccactgcacgccagcctgggcaacagagcaagaccccatctctctcttttttttgtccttttagagacagtctcgctccattgcccaggctggatatgcaatggcaggatcatagctcttcacagcctcatatacatgggctcaaaggatcctcccacctaagcctcccaccaagtaactgggactacaggtacttgtcaccatgcctggctagttttaaatttttttttttttgagagggagtctcactttctcgcccaggctggagtgcagtggcacaatctcagctcactgcaagctccgctcactgcaagctccaaacctcccgggttcaagtgattctcctgcctcagcctcccaagtagctgggactacagtcacccaccaccacgcctggttaattttttgtatttttagtagagacaggttttcaccatgtcagccgggatggtctcaatctcctgacctcgtgatccacccacctcagcctcccaaagtgctgggattacaggcatgagccaccacacccggcctagtttaaaaattttttttgtaatgatgggatctcattacattgcccaggttggtctcaaattcctggcctcaagcgaccctctcgccttggcccatctctttaaaacacacaaacacacacacacatacacacacacacacacacacacacacacacacacacacacacagtttggagtgtttttccagaatatttagaaagaacagcctgtaagagccaagatttagacaacagacttttctatgcaagaattttttttctcagcaaaatacagcccatggggcctaatttggccaaccacctgttttcgtacagcccatgagataagaatggtttttacatttataaacggttgaaaaaaatcaaaagaatattttgtaacacatgaaaaatatatgaaattcaaatttcagtgtccagaaatggttttattggcacacagccatgtccattcatctgtgaattgtctgtggcttttctggcagaacaatgacagaattaagtcattgaaatacagatcagtggccaggcatggtggctcatgtctgtaatcccagcactttgggaggccaagacgggcggatcacttgaggacaggagttcaagactagcctggccaacatgatgcaaccccatgtctactaaaaatacaaaaattagggccaggagccatggttcacgcctataatcccagtactttgggaggccgaggagggcggatcacctaaggtcaggagtttgagaccggcctgaccaacatggagaaaacccgtctctactaaaaatacaaaattagccaggtgtggtagtacacgcctgtaatcccagctactcgggaggctgaggcaagagaatcgtttgaacccaggaggcagaggttgcagtgagccgagattgcgccattgcacgccagcctgggcaaaaagagtgaaactccgtctcaaaaaaaaaaaaaagaaagaaaaaagccaggtatggtggcacgtgcctgtagtcccagctactcaggaggctgaagtgggaggattacttgagccgagaagtttgaggcttcagtgagctatgattgtcccacaggactccagcctgggtgacaacagagtgagaccctgtctctaaaataagtaaatgtatcaatttataaacaacactgcagtgaacatcttgcacacacatcttccatcatcttgggctctcagggctctgctggctgaagtggggaggctgggccaggaggcttctctgtctcctagagagaatggggacagcagcccctcctcaccatggctcacttctccccttacccaggctgcccatactggagacagcatttcctgctggagaacctcatcccagcccgctggactccatcatgagcaaccgcttcccccgctggttcatccttggccacctggagacccgccagtgtgaactggcttccaccatgttgacggccgccaagggtgaggctggcagctgtcccgattcctttgtcttcctcctctgtcatctccttcttccttccctcttaactttcctgcctcctcttatcctttcacaaacttccccctgcattctttgagcacctcctatatgtaccggacactgtctcaggtgctggggatgtagcaggtgacaaaactgtcccagatcccctgccctgtggaatgacattctagtggggagaagagagtgatgcagtaaatgagacggtaacaggtgccatggagtggaataaaacagttgaacatttaagcagagacctgaagatgaggtggagccttgcaggtacctggtgtcttagctcaggctgctgtaacaaaacaccagagactgcgtgacttcaacaacaaaaatttattttctcacatttctgtaggctagaagtctaagatcactatgtcagtatggctagctcctggtgagggctctcttctcagcttacagacggccaccttcttgctttgttgagagttggggggagtgaagtggggagtagagaggaaagtgagagagaggaggctgggagagagagagagggagaaaggagagatagtagggggggatagagagagagggagagagaggagtcaggtgccagagaggagagagagaagaaagagaagagggagagaggagagacagagaggagaagttaaatttctccagtgtatcttcttctaaggtcactaaccctctcatgagtacctgaacttcatgacctcatctaaacctaattattggctgggcacggtagctcatgcctgtaatcccagcactttgggaggctgaggcgggcaaatcacttgaggccaggagttcgggaccagcaaatcacttgaggccagaagttcttcaagaccagcctggccaatatggtgaaaccccatctctactaaaaatgcaaaaattagccaggcacagtggtgcacgcctgtaatcccagcgatttgggaggccgaggccgggggatcacctgaggtcaggagttcgagaccagcctggccaacatggtgaaactctgtgtctactaaaaatatgaaaattagctgggcgtggtgaccggcacctgtaatcccagctacttgggaggctgaggcaggagaatcacttgaacccgggaggcaaaggttgcagtgagccgagactgcaccgttgcactccagcctggacaacaagaacaaaactccatctcaaaataataataataataataataataataataataataataataaaagctaacatttgagcagctccttgccatgttaaggccttgccaagtatgggcccaccaccaccctgtgaggtgggttccattgcctgagtgttacccattttacagatggggcagccagggcacagagaggtgaagtgacttgctcagggtcacacagctagtgggtggcaggaccaggatttgaaccctggcattctgggtgtgcaaccaatgcccttgagatgagggagaggtccataggatccctaggtggcttttcttttcttttttttttttttgagatggatattactctatcatctaggctggagtgcagtggtgccatctcagctgactgcaacctctgcctcccgggttcaagcgattctcgtgcctcatcctcccaagtagctgggattacaggcacccgccaccatgcccagctaatttttgtagatggggtttcgccatgttggccaggctggtctcaaactcttgacctcgtgatccacccacctcagcctcccaaagtgctgggattacaggtgtgagccactgcgcccggcccctaggtggctttctgtaacaggaaagggccagagaggagataattggcaagggctaggggcactgaggtctgaatcttcacagaaccatggcccagtacacatccctccacactcacacatgtgcccctgggtggaaggatctgtgtgaacaggtcgggtggtggtcagaggctggtgctgaggtgtatccgatggtgtcctctgtcccgcccttcacccaggagaccccaagtggctgcacacggtactgggctccatccagcagaacatccactctccggccctgctctttaagctggcgcaggacgcctgcaagacagccaccccggtcagcgccccaccagacaccacgctgctgggcatcgcactggagctggggctgcaggtgagggctgccaggtggatgcgggagggcgatggtggctcggggccaggactgactgtgagctgcgcctcccggggcatgggctgagtgtgagccacttcgctgggggcccggcatttgcgtgagctattcctctgtggctggggactgagcgagaaccactcttggggcggggactgtgagtgagacacacctctgggggcgtggcctgagtgtgggccacttccttgggggcgtggcatgagtgagccactcccctgggaatggggactggatgaatcgtgtctctggggatggggtcttcacttgggccacacctctgcaggtggggcctgagtgtgaacctcacctttaggggcggggccacagaaggccaaggtctgtaagtcatgggagtgtgggaatggggttcccagtagggatgaagcctatgaattattaatagaatccgtctatggaggagactgaggtctaggggagagttgtcactggagcggagaggcagggcctgcaagccagcagatggatcgcaagcggagcctgggggtggggcctgggagtgatgtgctattggttaaggatcatgggtgggtgagtttgaagctgagggtgaggcagagcctagcaataaagagcttccttgggggcagggcctgaagaggattgccgcctaaggagagggattcaccactgaagggctggcctggcggaaggtcttgaagatgagatgccaactctaggggtggggtctgtggttgaaagccctgtatgagcccgggtgtggtggctcacatctgtaatcccacactttgggaggccgaggggggcagatcacgaggccaggagttcgagaccagcctggccaacatgatgaaactccgtctctactaaaaatacaaaaattagccaagcgtggtggcacgcgcctgtaatcccagctactcgggaggttgaggcaagagaatcgcttgaacccaggagggagaggttgcagtgagccgaaatcacaccactgcattccagcctgaaggacggagcaagactccgtcttggggaagaaaaaaaaaagtcctgtatgcagggcctgcaactgagtgtctgggtcatccccaggggctgaacaaagggtggtcctgcaaggccaaatcttgggtgcagcttgctggaaaggtgtcattggtagggtgtgagtgccatgggacctggaggagggtggggtctgcaggatagacaggtaaggggcggggcctcaaagggtggcagaagttcactaagaagataaggaatagggccgggcacagtgcctcacacctgtaattccagcattttgggaggccaaggtgggaggattgcttggggccaggagtttgagattggcctggacaacatagtgagacccccatctctacaaaaaactttaaaaattagccaggtgtgatggtgcacccctgtagtcccagctcctcaggaggctgaggcgagaggatcgcttgaggccaggagtttgaggctgcagcagtgagctatgatcgcgccactgtactccaggtaacagagcaagaagaccccaactctaaaagaaaaaaatagaaaagaaaaaagaagttggggccaggccctgtggttcacacctgtaatcccagcactttgggaggccgatgcggatcgcttgaggccaggagttcaagaccagcctggccaacacagcaaaaacccgtctctcccaaaaatcagccatgcatggtggtggacgcgtgtagtcccagctgctcgggaggctgaggcaggagaatcacatgaacccaggaggtgtaggttacagtgagccaagagaccacaactgcacttcagccccggcgacagagtgagaccctcaaaaaaaaaaaaaaaaaaagaaaagaaaaaaaaagaaactggggaccttcccagctagaacaaacaagggccagcagggtgcagaatcagccctggacagcctcctgattggagccgttgtagtgtggggagcaagacaaggagctttcagaggctactcaagaggtaggagcttacagaaggcagggtctgcaggacaggacctgtggatggggcctcaggggagaggcaaacacgtgagctgctgattggtggtgggacctagtgaaggtggggcttatacagcaggtacttagaggcaagagagaggagccaacaggaagcatggaggtttcaggagcgaagggacaggttggtttgttccggcataggatctatgaggtgggatctggggtaggatctgtgaggactcacttcagaagaacagcaacaacagcagtgatattaagagctgacattacctgagagcattttcaagcaataagcaccttgcagaaagcttcacctacgcaattttgtttacttctcacaacaatcaggctgggtgcagtggctcacgcctataatcccagcactttgagaggctgaggcgggcggatcacttgaggtcaggagttcgagaccagcctggccaacatagtgaaaccccatctctactaaaaatacaaaaattagctgagcatggtggcgggcacctgtaatcccagctacttgggagcctgaggcaggagaatgcttgaactcgggaggcggaggttgtagtgagccaagatcgcaccactgcatgccattctgggtgacagagcaagattccatctcaaaaaaaaacaaaacaaaacaacaacaaaaaagaaaaaacaacaatcctatgagacagatactattttatctccattttctaggtaattgaggcccagaaagttgagatcacttacccgggttcattggatcagctttaacctccaagtgtttctggggtcctccatctcccaacgcccctccataggccagcccaagactcaggctaacccccttctccccacccctaccttgcaggtgatgcggatgactctgaacgtaatgacctggcggcggagggagatggtgcgctggctggtcagctgtgccacagagattggtgagagcccctaaggggacctgccacccacttcgctgttctggttctgcagagcgcactgagagaaccaggcagacaagaaagagagaagtggcggggtgcggtggctcacacctgtaatcccagcactttgggaggccaaagcgggaggatcacttgagcccaggagttcaagagcagcctgggtaacatagtgagaccccatctctacaaaaaattaaaaattagctgggcgtggtggcaagtgcctgtagttccagctgcttgggaggctgaagcaggaggatagattgcttgagcccaggaggtcaacgctacagttagccatgatcataccactgcactccagcctgggcaacagaggaaaacctcctctgggaaaaaaaaaagagagagagagagagagaagcaagccaggcatggtggcacacacctgtagtcctatccggagggctgaggtgggaaaatcacttgagcccaggagattgaggttgcagtgagctgtgattgtgccactgcactccagcctgagtggcagggtgagaccctgtctctaaaaaattgtttaacaaaaagaaagagggccaggcgcagtggctcacacctgtaatcctagcactttgggaggccaaggcatgtggatcacttgaggtcaggagttcgagaccagcctggccaacatggcaaaaccccatctctactaaaaatacaaaaattagccagatgtggtggcaggtgcctgtaattccagctactcgggaggctgaggcaggagaattgctggaacctgggagacagaggttgcagtgagccgagaactcactaccgcactccagcctgggtgacagagcaagactccatctcaaaatgggcagatcacaaggtcaggagattgagaccatcctggctaatacggtgaaaccccgtctctactaaaaatacaaaaaaactagctgggcgtggtggtgggcccctgtagtcccagctactcaggaggctgaggcaggagaatggcgtgaacccaggaggcggagcttgcagtgagccgagatggtgccactgccctccagcctgggcaacagagcgagactccatctcaaaaaaaaaaaaggaaagagaagtagagactcttcagagactcttctccgattccagcctgtgctcagggcttggccgggagggaatggctggccagcatggagctggacaaaggcctagaggctggccaggctaatgtggctgcagggggttgagggggttgcagaaagaggctccaaagcttagccttctacacacgtgattcccacctagtccaggtgcgccctgatgatttggaaaggaagtttctgttcagcatggtgtggaggtggaagtggaggtggcagtgtcatggttaacccacgcatacatgtacgtgtgtctgcccccgctcctgacggatttccctccctcacctcccaccaggcccgcaagccctgatgaatatcatgcagaactggtattccttattcacaccagtggaggcggctaccatcgtggcagtgacgggcaccacacacgccactctgctgcgactgcagctggacacatcgcggagggaggagctctgggcctgcgcccgcaccctggccttgcagtgcgcgatgaaggaccctcagaactgcgccttgcctgccctgaccctgtgcgagaagaaccactcggccttcgaggcggcctaccagatcgtgctggacgcggcggccggcggcctgggccacgcccacctcttcactgtggcccgctatatggagcaccgcgggctgccgctccgggcctacaagctggcgacgctggccctggcgcagctcagcatcgccttcaaccaggacagccaccctgccgtcaacgacgtgctttgggcctgctctctcagccactccctgggccggcacgagctctctgccatcgtccccctcatcattcgcagcatccactgtgccccaatgctgtccgatattctgcgccgctggactctctcggcgcccggtctgggccccttaggggcacgccgggccgccaagccactgggtgccgaccgggcgccgctctgccagctcctggacgcggcagtcaccgcctacatcaccaccagccactcgcgcctcacgcacatcagcccgcggcactatggggatttcatcgaattcctgggcaaggcccgggagaccttcctgctggcgcccgacgggcacctccagttctcacagttcttggagaacctcaaacagacctacaagggcaagaagaaactcatgcttttggtgcgggagcgttttggttgagggacagtggggtgcgtgggagtggggatccccctcgcccctgcgtcccccacccttgctctccaattaggcccacgtggcatttcagtattattaagtcagggaaggagcccggctggagatgggggcagggggagcagcatcctgccacgtgtgtgcctgggagtctgtgagcaagtgtgcaagactccagaagcagaagccatactgccacccagaagcctggaaggggtgtgtgcttgggctgctggtatgaccccactttgggcaccccaaaagcaataggcaaactccccttacccagactggcttgggctccaggagggaggctgggaggcaggactttccagaaatcgaccctctaagtcaatgtagcacattttcccccaaccccaccctgggtggccaagggtcctcccccaccccctactgctcagggccccccattatgccacctccaaagtggctgcccagccaggaccattggctcacccccactgaaggaattgaagaggcctcaggcctcagcctcatacctcacccccttatcctatccggccaggacccccatttccttgggcactagggtcccagggtgggctcagggttggggaagtcctcgctgccctctcttctcacctgctagtcactggacgtacaactcaggaactgagcgaggctcacactgccccttccaacctggggttgggggacacagacgcgagagagccggagacccccacccccgatctggaaaggaaagagacctgtatcttggtgtttttctggctttttcaccctttcgcctcctgtctttctgcttcgccccttcatcttactctgtttccatttttcccggcacttacctgcctttctctctgcacctaagtccctgccgccctctctctttggccatccttcctttcccccaccttgacccagggaggagaagggagaacatcacccccccaagtcacccccacatcttttcccttcttgtatattaaggacaaaataccacatcattttgtaactttttttctatttattgaacggtgtattacatgtccttttcctttttttttttcaaagattgaacagaaatttttctttttaattttattttgagactggggtgcatctccagagccactcacaccctcaacctcgtttcctccgcaaaaaaaaaaaaaaaaaaaaaaaatgtctggccttatttctgggtgcagcgccaagcgaggggtgggatgggagcgactgctggcttcattccatggtaattatgtaaatatttccctttttttttttttggtctttctctgttgcccaggctggagtgcagtagcgcgatctgggctcactccaacctccacctcccgggttcaagcgattctcctggctcagcctcccaagtagctgggattacaggcatgcgccaccacaccgggctaatttttgtattttttagtagagacggggtttcaccatgttggccaggctggtctcgaacacctgacctcaggtggtctgcccgcctcagcctcccaaagtgctgggattacaggcgtgagccaccgcacccggccttatgtaaatatttcaaaacagagatggacagctcaccatgagggaacacagggctgaatgcgttaccgctgtcatttaatcgtcaccacagccctatgagttggtaggattatcttttccattttacagatgagaaaactgaggttgcaaagtggaaagaaagggcacccagcggccgggcgcggtggctcacgtctgtaatcccagcactttgggaggccgaggcgggcggatcacgaggtcaggagattgagaccatcctgactaacacggtaaaaccccgtctctactaaagatataacaaaaaattagccaggcgtggtgacgggcgcctgtagtcccagctactagggaggctgaggcaggagaatggcgtgaaccctggaggtggagcttgcagtgagccgagatcgccccactgcactccagcctgggcgacagagcgagactccgtgggtggggggcaggggggaagggcacctagctaggacgtttgatttaggacctggttggggccactgacccctgcccacccctgactgcagggtccttgagcccctaggaagggccaagatgggggtggggggcgccctggctccagacaccaatgttgggggtccttgtctccaaattgctgagcatgggaggctgtggcaggtgttggtgcagctggatggggaagacaccccgatcaaaagcgggaaccccgggtttagactcgacctcggtgggcggggctctggccaagagaagaaaaacggagtgggggtggtctgtgcgtggacactcgccaggggacgtggccagggcgtgtctgggatcttgcgccactgaagaggctcccagtcgtcaaatagagtgagggatgggatccaaaggacggcgagaaagcccgtggttgtctaaacgtccctggctccccgagaagcagtttcctcggggccttcctgccttttggatgaatggagatgctgtgtctgggtcactgccagagccggggcaggagaggacagaggcttcccggagcggcagggcccgtcgctagagggcggggcccgcagtcgggggcgggactttggcggcgctgtgcatggggattggcttttcgcaccgcccctccgctcgagtgggccaatcggagacggccccacctcctgccccgccgcgcgtattccagcaggtatgtgcgggcggacccgggactgccccgcgcgctccgtggcgccgcctcgaggtctgggacggtggaggtgggtggagagcccggagtgcaccccttgtggtccctgccgccttcggacctgggggaccctttactgtgcccctcaggtgtcacccacgaatgttcccatgttcctggggcgtcacgcaggtcccagccacatccaaatgtccccccttaagaactggggtttccttcatgtcacatccctcaaacccaagttcccctccagcattctcagataccaggcaccccaaatcttcccctgaggcctgagtaatcccgtaggtccaagttgcccccaaatgtcactagctcaagaccctcagatcctggttatcgccacatgtcacccctcaggctcagcgtttccctcagggtcaccccaccaccaccacttcagatcagcttccatcctcccttgatcagcgatgtgaaaatctttccactctagggtttccctcatggtcaccccacgatccaggacacccccaaggtcacctttccaagcacaggataccctgctgcacagagcaggtggggcagggatgggcaggcaggagcccggagtgccaggatggtaaattcaggccaatcaaaagctgaaactccagcgatgggaggcaggagtgaatcacagaccagaccttcaggaatgaagtcagggcaacttttatttacttgaacaacagacatgacacacagcacgatctctcctctccatcccatcccaagcttctgtccacgactacccagggtggggaaaaaggcaatggcccagccccgatgacctgggggacttcagtgtgcctcctcagtcccacccagaaaaaagcctcctcccatctgatttcaagatagtggagaaaagccaggcacggtggctcacacctgagccacctgtaattccggcgcattgggagactaaggtgggaggatggcttgtggccaggagttcgagaacagcctgggcaacatagtgagacctgcccccccatctctacaaaaattaaaattaaaaaaattagccaggtgtggtggcgcatacctgtagtcccagctctactggggaggctaaggcaggaggatcacttgtgcccaggaattcaaggttgcaatgagccatgatcacaccagcctggccaagatggtgaaaccccgtctctactaaaaatacaaagattagccgggcatggtggtgggtgcctgtaagcccagctactcaggaggctgaggcaggagaatcgcttgaacccaggaggcagaggttgcagtgagccaagatcacaccactgcacttcagcctgggcaacagagtgagactccgtctcaaaaacaaacaataaaaggccaggcacggtggctcacagctgtaatcccagcactttgggaggctaagacgagcagattgcttgaggtcaggagttcaagaccagtctgggtaacatggcgaaaccccgtctctacaaaacataaaaaaaaattggccgggcgcagtggctcatgcctgtaatcccaacactttgggtggctgaggcgggcagatcacctgaggtcaagagttcgagaccagcctggccaacatggcgaaactcggtctctactaaaaatacaaaaattagccaggtgcggtggtgtgcacctgtaatcccagctacttgggaggctgaggcaggagaatcgtgtgaactggggaggtggaggttgcagtgagccgagatcgagccattgcactccagcccgggtgacagtgcgagactccatctcaaaaaaaaaaaaacaaaaaaaaaaaaacagagtcctaactcttccctgccctgagaaccccctcaaggcagggaggatcagctattcccagcgcctcaggactaagcacacctgcttgtgtcccttctgggtccacaaggaacttgttccatgccccacatgtggggcgggtgtcactgctcctcccggcaagttagaaagctgcagggcccagcaagaaggggccaggtcaggtcaacccagcctgataccggaagccaggagttggcatttaacggtctggaggcccaaggcagcttcctcttgggtaactggctgctaggaaggtgcgggccgggccagtgcccctgccaggcttgggagaggaggggccaagcctccaggcccggaaaggacacagctggcttcccttttaatggaagggccacccactcacccacctatctatgctggcaccacagcccagcctgagctgtggccatgcaggggtccccagttgcagagttggggatcagggcctgcagcacacatttgggcccagccaaccccacccaccacatccctcctccagacacaggtctgattctgagtcctcatctctgctccaagcatcagcccacccagggaaggcaggggctgcaggctccaagggggcttgacccctgttcctgctgaactgagccagtgtacacaaaccaactgtgtttcagctcagtaggcacgggaggcagagcccagggaggccaggcagcaggatggcaggcagacaggcggcagcaggggacaggcggcaaggccagaggaggtgagggcctggggggcggaacttagccactgtgaacacgacttggtgtggaccctgctcacaagcagctaagccctgctcctcaggccaggcacaggcttcggggcctctctgccaccccgtccccgggcagcatcctcggtggcagagctcagggtcggttggaaatccctggcaatgtgatttgtgacaggaagcaaatcccatccccaggaaccccagccggccgtggcacaggggtgaggggggcaccgggcggggccagaggctggcacctggaggggagaaagagagagagagcaaaggaggtaatgagatttggggacacctcccctccaggtccccagatgcttcctttgatcacagggaagctcttttctcatatgcaggagccaccacacggggagctggagcctagctgtgccctccgttccagccccaggactggagaggcagagatacctagagggcccatgcgggacaaggaggctacagcaacttgcatggccaagctcccccctcattgagccctgggcaggccaaatggggccatggggagaggaagccaaggggggccaggcaggcgggtgaggaagtgatctcaccccagctggcgccacttcctagaagcctggagggcaggaggaaaccaccagggcctccccccccgtggcccggtctcctcagtggccagggcttagcccacacccaccagggcggatgccggcagcaaggcacccccctctctttctagacacgcaccccccgccccccagagcacaggatccaagctccaagatacaggcctctccacccaaacagcccaaggttcaaatccttgctccacagtttcccaaagactctccaaagcttcagtttccccatctgtaaaatggagccaagagcctcttttgcatagcccagtgagatgtcaccgagtatgtatgtcactcagtaagtgcccagcaccagggcaagatacaggattttcaggacccggtgcaaaatgaacacgtggtcctctagttcgaaaactaagaatttcaggccaagcatggcggctcacgcctgtaatcccagcactttgggaggccgaggcaggagagtcacctgaggccaggagttcaagaccagcctgcgcaatacgacaataccccatctctacaaaaaaaaaaaatattttttcttttttgagacagggtctcactctgtcgccacggctagagtgcaggggtgcaatcacagctcactgcagcctcagcctcccaggttcaagtgatcctcccaccttagcctccggggtagctgggactacagctatgcaccaccatgcccggctaattttttctttttcttttctttttttttttttttgagacagagtctcgccctgtcgcccaggctggagtgcaatggcgtgatctcggttcactgcaacctccacctccagagttcaagcaattctcctgcttcagcctcccgagtagctgggattacaggtgcccgccaccacgcccagttaagttttgtatttttagtagagacggggtttcaccatgttggccaggctggtctcgacctcctgacctcaggtgatccgcccacctcggctttccaaagtgctgggattacaggcgtgagccaccacacctggccctaatttttgtagagatggggttttgccatgttgcccagactggtctccaactcctgggctcaagcaatccgcctgcctcagcctcccaaagtgctgggcttacaggcctgagccacagtgtctggcccacaaaaaattcactaaaaaatcagccaggagtggtggtacacatctgtagccccagctactcaggcggctgaggtgggaggactgcttgagcccaggagtttgaggctgccgtgatctatgaccatgccactgaactccagcctaagtgacagagcaagaccctatctctaaaataaacaaaaacaagtttaaaaaaagaaaataatttcaggctgagcgcggtggctcatccctataatcccggcacttcgggaggccaagacaggaagatcgcttggggccaggagttcgagaccagcctgggcaatacaagacaaaaaaattaataataataaaaaaaaattcatgaccccagcagtgcaacattaaactaacctccaggtccctccaagcagggctgccgtgagactgcccgtttcacaaatgcatgaagccagccctaagtctttagtgagtggagcttcttttgataagagcccaacacctggctagcagactccagttttggagcccaagtctgcccagatttgaaagccccagctctgcagcttctgagctgggtgactctgggcaagtcactcaacctctctgggcctcagcttccccatctgcaaaacagggataataagtatggacttcataagtcatggtgaggaccccatgagtgataaacatgatcacgacagagctgctgctgtctttgccaaggcaaaggataacggaaacgtgggtgtctcacaccaggaccccagtgtccgcccgatgtggtggcgctcaccacttcgagacaggcggcgagtgatgtcctgttttgtcccctccctatacacacatacacacataccagccactctttcccatcaggccccagcccagccctgtccccttagggtctggaggcgccaactgggagcaggcgaggccccgcagggcggccagcctccctgggccgcctccggaagtgagacagcacattcgtgtcccagggacgagaacgggaagggcggccatttggccaggctcgtttcctgtggggtttcccctgcacagagcccagggccggggccaaggccactccccatccccgcaggcacaaaaggtctgggtcttgagtggaaggggtgctgccatgcaggtgcccaggagacagggtcccctttaccaatcatggtgcacttctcaggctcttgggagatggtgtccagggggaaaccaagctcctagcagctggaggcatgagggagagggcgggcccctgggctggggagcaaagcaggccccaggctgcatcaggacaccccggccagccaatgcatgtgggtatgcctgaataccccctccagacagcgtgtgcgtggaccagacacacaagggtatgtatgtgtaccgctacccccccaaccccatgctccaagaatgaatcaggggcagcttccgccgggggcgccaccaccacctccgcccccaagcctggtccccaaatactttccaccctcacagagcagctgggatcggaaaataccaagggctgcaggccccgccctgcccgccgcgccacccgccctcccagcctgtcactaacgctttgcctaatgggcccagactctcagcagaagctccgtgggctgggcctcgagccagccgccaacctgggctgcccggccaagcgccgcctgaccaggagccccccgcccctctgccccaatcccagtgcagcgacaataacaaccgccccgatgggcagccctcagagggtggcactgggtagggaaagtcagggcactgacaagtgggtgggccccgctgcccacccagggctggggtggggggaggctcaggaaggggtgagtaagtgagggctgaatcacttgttataaataggggaaccatgaaagtgacatcccagcccccattgcgtcccgccagtccacactctaacccccacttagactttaatctttcccagaccaatcacagaattcccaggggccccctcaccttcatgttgggaacccttagtagagtggtacaccccgtcatcaggtccacccctgccttctccccacataggtacattttgcagtgagggcctggctgtgggggtcccctggccttgaatgcagtcactggtgtctgcgccctatccacctccctcaacgcaccgattcccaggcccaaggctcagggcctctaggctctccaaggcattctcagggtgtgggccaccacagtcctggagggtgaccccagaacctaggccaggcgggaggccagggggcttggcatcttcgaagtcagttccccaggcaccgaggccccacatcctagaccacccagccctgctctgcccagggccacagctcagtgaccacacccagggtggcgccagctccagcaccctggggcaaggcgtcgctggagcgtgactcagccgtgcccagcatggcggcgcccttctctgcccagggattctcacccacacccactgccctccgctcaacatccttcccaggcgaccggccctaaaggacacaccttccccagacacacctccgtgtccacccaggacaccaggagggaagaaggcggccaggggcaaagtgtacacttctctccgtcccatttccaaatgcttcccatttatagatagaataattaaggctcagagattcagactggggcttaaggtcatggaataagtcttaaaaaaaaaaaaaaaaaaaagccaggcctgactgtggcctaaaacacatccaacgtggaaaacagaggttacaggaaggagttttctcaagatcgcccaaggttcctggcgccgttattcatggaggacagaatcccccacccagctttccaaggtgaagggcaaactccaaaaaatgctttaagaggtatcaaagcaccacctagatcgggcgagcgggtcaccccagtgtacccaccgggctaattaccctgggattgcagatagatgggggcctgccccgcagctgcggtctgcatggaacatctggcgtccacttgcattgttagagggtgggcacgacacgggggtccctcctaaagcatccgcctctgctgtctttctccagcgagcaagggtcggcggaggctcagtggccaggccagcacagacaggcccgaccctctggacacgccctgtcacgcatgtgctccgcgtgccagccccaggccaggccggcacctattttagggccccctctagatccacaggcaaggcctgcctgttggggtcttgaaggagctcccagaggacgtgctgcaagggcagagggccatgggtgcctcacgggatcagagaacaaagctagcaccagccccagggcctgtgccttcccaggacatcggcatgtgaacacatgtacccaggctggcccgggcagggcatgtgggcgagcggacagggtgtgtccaacatcacctcgcctctaagcctgggcacctgttgggtacagccctccagctggggcaggactgccagaggacaccccttatgccaggggtcccccagcccccagcctcaccctcatagaccaggagtcagaggctgccagctggggaaggttgggaagggggcaggtgacaaggagccagctgcacagccaaaacattcaagaagccactgggtctggggcctggctgggctgggctgggctgggctgggcaggaaggtcagttagggctaagggctttaggggcagccaaatctagtgctaaaatcagaaaacagtctggggctaagacagaggggtcggggttcagtctgggcccttttaacctcctccttcagccaaaaggcacggggaccccaagctgcacagggctggtccccaacctggctttccttcctatgcaaccttgaatgagcgcttttctccgaagggaaaggagacatccccccagctcccaccagcccctgcccaacaagagaccttccccctacccagcgggcgacacgtcaagaacttggaccggtatccacccccgcccccacccaaagaactctgagagacccccccaacccattcctcccgtccaaaggccaggtcggggggctaggagtggggtaggcatatgcatatccaagcccctcaacccaagccccatgtccgagccggacacaagccctcccaccctgacaactctctgcccaccttgacctgcccaagtcgcgcggggacccgccctccccaccgcattcccatgcgtcccctggggggtcggggtggaggggccactgggaagggaacagaggccgggccgcccttcccccgctccgtagggggcgccccgggactccgcggccgccgtcgccaccgtcagacgcactgtccccgatccccgacccaccccgggcggcggggcgctcaaggcgcgcggggcggcgccctcgccttctcgcaacgctcttggggacccgccgggcgcagccccactccgcccacgagccaggcgcggaaaagttgccggcgccgctgccgccgaggcgccgatcgctcccggcctccctcctgggtccctcctgacttccacttacccgcggggggaggggagccgggcgcgcactccgggctccggccgccgccccgggccgggccggccgaggctcaggcgggcgggctgcgggcccgagaccggccgggggcggccgccggccgcgctccaccccactcactggccggccagccgcggggccgaatcgcttttaaaaccttcccgtctcctccccccctccccgggccgggcagggggcgggcgcggggcggggcaggcgtcgccgtcatgtgcccccgagccggcccgcccccagtttctctgtcctgtcccccaactctgtcccgtcccccaactcaaggccaactttctccctccttgtcccgaaatcagcctgggccccatacccagcccaacttccccctctggaccctgaacttgagtcccagtcccgagttttaagcccaaggctctgtctgcgggggtagggtgggagcaaagggtctaaccccctatcccacctctggaacccctgttggtctaaggcctgcgcctgcccagggagaggcaacccaggaggccgtgagcccctgggaatagagattggtgaggggcggtttggcgggtgggctcggtcccagacccagggcacactgggcactgcagacccctcccggggaggggggcctgggtctgggtattgccctgggatgccaccaaacaggaacccccacttgctccagttccacagcgccttctccagccttaggaagttcctcctcttatcctacctaaccctctcctgctgccatagaaaagactttctggtcccaggccatgcagcccctgggtctgggtcccctccccctaggcttcccggcaccctcccccacccgctgggacctctgggaaactccccgggctcccggagtagctctgggagcaaggccctccctggatccctccctctttcccggtgtgcctgtctttcccgctccatcctccagcctccaccgggaggaacgcggctgcattgttcctcaggaggaggccctgcctcggggcctggcccagtgcccaggtgggtggccaggaacaaaactctgagatcgaggggcggggtgccctctgcaaccatgccagtctccttgggcatgtcccgctgccatctgccctctccaggactcgacaaaggccgatggacccctatccaccacccacgaccaccatcgtgtcacagtgggggtctggaacccgcaggacccttcccagacctgggtgggcattgctttgggggatgatgttttccactcagcccccaatatttttgaagtgtcatccttggggctagggatccaattcttcatccacgtcctgggtggtaagatagcagcctccccttttgagtaactctgggggtgggggcgcgggggtacccagcagcaggccaggccctccaagggactggagggactagttggatgcttctgtgtcaccttgcaccccagaattcctccagggtcccccatttcatcagctcagctggctctcaccttgctacctggtggaactggggagagggagttaggagccacacccagctaccatcccgtggggcccagccctggggactccagggccttttcttccctgtggggcccaaggggcaggctggcccaggatgcaggatctgacaggttggggcaggagggggcagagccgcctagtggggccccaggggaagatttggggtggcacagaattccccaactcagggtggggcgcagaaggtgggagcaacttaccacatggccttctgagcagctacacacaagaatggcatttccagggcgggcctggggtgggggtgggggtctccctgtaagggacacacgcacacagacaaacttgtcattgcaaaagtagaaagtgaccaaattacaatgacaaacaaaactcggatctctaccgcatccccatccatattgcccctccagaattcccttcaccccataataaggccttccatccagacattgcctgtcccgtcatcagtccaattcacattcagggagaacacctcctccatgctggcctctggggatacctcttcccccagattttttttttatctaattttcgctgttctgttgcctgtggcttggaccacaccccggctcactagtatccctcagcccaggcttggagggtcctcccagaacccccacctctccctctgggtcccttgacatttacttccacaggccccggtcctgagcctgccggtttacccaggggacagcaggtgagggagtgatgaagggacagggcgaaggtgagaccaggtcaagtggtcaaatggcatggcacacacacacacacacacacacacacacacacacaccacacacccttttgttcattctacaaacattgagtgcctgctgtatgtatgtcaggctctgttccgggcatttggggacacagaagagaacaaaacagaaaaaaaaatccctgtacttttgggaccagcatctatgggagaaacaaacatgataagcagatagataggtataaagatatataatgtggccaggagcggtggctcatgcctgtcttcccagcactttgggaggctgaggcagcctgatcacttgaggtcgggagttcgagacaagcctggccaacatggtgaaaccccgtctctactaaaaatacaacaattagccgggcatggtggcgcacgcctgtacccagctactcgggaggctgaggcaggagaatcatttgaaccaggaggcggaggttgtagtgagccaagattgctccactggactccagcctgagcgacacagggaaaccctgtctcaaaaaaaaattatatatctatatatatttttaaaaattacatatctatatatttaaaaattatatatctatatatattttaaaattatgtgtctatatgtttaaaaattatatatatattgttttaaattatattatatatatatatatatatatatataaaatgtgttgggtggaaagtctatgggtaatctagaaaaaggcaagagagatgagagatgaaatgagtggaggttaggtcaggaaagtcctccctgaggaggaggtgactttgaacaaagacttttaggcactgagggaaaagccaggaagacatcgagaggaagagagttccaggtagagaacggccagtgcacaggctttgcggtaggacggtgcctggaacattggaaaaccagcaaagcagaccggtttcatggaggcagagagaggagtggaatggaagaagaacaaagatttgttttgttttgttttgtttgagaaggagtctcactctgtcgcccaggctggagtgcattgtcacaatcttggctcactgaaacctctgcctccccagttcaagcgattctcctgcctcagcctcccaagtagctgggattacaggcgtgcaccaccatgctcggctaatttttctatttttagtagagacagggtttcaccatattggccaggctgatcttgaactcctgacttcaagtgatccgcccgcctcagcctcccaaagtgctgggatgacaggtgtgagccacagcgccaggccctacaccccagctttctagctggatgtctttgggatggctttggggccaggcgattacacttcctaagcctcagttttgtcggctgaaaaatggggctgaaaatgcgcaatttgcagttgttaccaggctttgaggtgagacgtgtgatgtgctgatcgcaggtagaaagagggtaagtgatacaccaggtacacctggatcaagggaccctgacaggcccagccggcccacaggtcaccccagctcacatgcagggctgcctgctgggccccatggcaacgccacacacagagacatcaaacaggccctgccgaggaagtcccacgtcactgcggttagagtggctcctcccagcccagcccccggctggcggcagtgacccccatgccagtcagggcccctgcctcctgttgccctggcgaccagctgtgttatggactgagccgggatcccaccacatccctgccccctcaccagggcaccagccactccccacatccggagaaggacattacacggtggccccagctcaccgtgacaaactcaattgcctggtgtctggagcaccaggaaagactttgtctacctacataatggttcagaagggcagagaggtcccagggatctgtggggactcccagccaggtgcctgaaatccccggggaagggtcccagtattgctcaagggcactggtggggcaggtcagacaggaatagaccccaggcctggcccagcccccacctcaggaatgactcaccacccacccagctcccgatgacatcaaggcctggcctgccaccctgacctggccccaggccagaactgggggggcgcacccaagaagtgtcacatctggctgtccctgcctggctgggatctggtacgcagagggttaaggagagcccttctgggggtctcccccccatcccatcccccccactttcccggggatttcgggccccagcccctctgacgtcactgggggttgctatggcaactggccgaagttcccaaataaaattaccgcgggcgggttaagtttcctaggaggcagccgacgggtaaacaatggcggtggcaggcggggccggcgagaggccgtctccccctcttacccccgactctgctgggacctgggggtccctggggcgaggggcagggtccccctccctgcccaggatctgagagccctcgagccagcgaggggattggcgcccagatgagggacagcgaggccacgacccacatgagcgggggatggggacgaggggtctttggaggggaggctggggcggcggggaacaaagaggggaccggaggcctggggatccaccctccacacaccctcccccctaaccccgctcccggccggccgccagtccagctgtggctgttcccagctccctggctccccacatctggcgggccgcgcgctcacttcctgtcgccccggctgcctggagggaggtaaaaataacccgccccctccccctgccggcggcgcagacggcggatcctcccagcctggaggagggcgaggccgagcctcagccgggagaggaggccccctgaggccgcctcccgtccctcccagtgcctcgctgtcctggcaggaggggggcaagtaggggtgccacagagcctaggctgcgctgggggactggggaagcgcatcccatgagaaaggcccttagctgggtcaccaggaacccagggaaccatagtgtccaaccacccccaccaatcccgtgggggagggggttcaagttctgagagttgagggactgcagccaacatgcctgggttccaatcgagggtcacccacttcctaacctaacagtataaacaagttaccaaaaaaaaaaaaaagccccccccccgcacacacacgacaagagcaaaactgctccaggcctcagtttacctagctgtaaaatgggcatgatagcagtactcacttcaaagtgcatttgttgggttaggagtgtcaactcactctataatcccaaaactttgggaggctgtggcaggaggatcgcttgaacttaggagtttgagaccagcctaggcaacatagtgagacccccatctctacgaaaaagtgaataagtaaaatgaaaacacataaaaaagaaaaataaagtgcatttattccctgagtgttagctatgatcgtttccccctccccaggggcccctgagacccacccccctccaccaagtacagttcccagatgagacacaggacacccagtgaaacttaatttttcagatacacagcggatctctttttttagtataagtatgtcccatgcaattttggggacatcgctatactaaaaaaaaagttttatactaaaaaaaaattacttgttctgtatctgaaattcaaatttaactgatgtcctgtattttttatttgttaaatctgccaactgtatccttaagtcaccatcatctctggcctaaatatattccaacagccacctccctggtcctctccgactttccttatgccttctagccattctccagagacagcccgttaaatccaatcacgtgtcccctctaccttccacttggaaaagttcctggtgtcccaacctctcccgcaggaaggtcctgcctgttattcgccaactcccgagcatccttcagttcccagggtatcacctcctccgagaagccctcctcaccttcttggctttagactgtccaggatccctgtaactcagccatctccccaactcaaccatttgagtgattgacttggtcatgtgagccaaatggacatttcttacaggactcaaagctggtcacttcccaggcagctggtccatctccgtgtctgagatgctagtatctactcttctccccgccccataggatctggggctccggaaggcccctcaggcagctcccttaagggtcctgtgggcggctcagtggtgactattggggtgccagggagcccggagttcaggccatctgaagctggtgctgggaaactctctccctgcactcagatggcatgggaagtctaggggggtgctggtgcaacctctgtagtgcacagccttcagtatcatgtgtcgacagcccccaaggagcccaccaggcgccatcccccacttgcataacctacccacacttcaatgtagccttggcacctatccccacaacgcctgaagactcccacagatatggccctgccaaggccaggcatgcaccctcctgagacaggtttgggagcccggatgccagcttggctgtgcatcctctggcaaaggacattgaccctctgttgactcagtttccccatctgtaaaatgagaatgtcaatgaaacgtcagagggccatggtgaacactatttttaatttttattattattattttttgagacggagtttcactcttgtcacccaggctggagtgcagtggcacgatcttggcccactgcaacctctgcctcccgggttcaagcgattctcctgcctcggtctcccaagtagctgggattagaggtgctggccatcacgctcggctaatttttgtatttttagtacagacggggtttcaccattttgcccaggctggtcttgaactcctgacatcaagtgatccacgggcttcggcttcctaaagtgctgggattataggcgtgagccgccgcgcccgacttcatggtgaacattacatgagttaatacacataggcccacacatgcatagaacaggcttagaacatagaacgtgctcattaagtgttagctagtttgggaggtcggcaggggtggggaggatgcaaaaaagccctcatcacagcgctcctgacagctcccgccaggccagctccccaaatcccttaggaaaatggcctcgacctctcagctgcaactctggcccagccgccatctcctgacctgaccgcccacttctggggagccccggtgggtctggattggagagagccaccctcagccctccccaccttcattggaccacagctgtctccttcaccatcacctccgtgcccaccaggattacaggcctgatctgaacccctaatctagggaagactacggagtcccaaaatccctcttagcgcgcaccccggcctgaggctcgaacccaggtccgcgctggagggcggtggcggttgccgagcaacgcgctgtttgttggcgcggggggcggggccggggccggcgcgcggtgactcaccgcggcgtgatgcggacgggcgcggcgcccagcagcctggccggcggcccgatctcggctggcctcggcgtccggaggggcccggcggcgggggcgccttagcccccaagtgggcgccggaggcccgtggggaagcggcggagcaggtcccgggctctcggactcggttcgaatcccagccctgcctcttactcttgactcttgatctgtgacttcaaggctccttgcctcagtttacccgtcagtaaaagaagcgacactggagggtgcagtaacccaccactggcatttaaagcagctgagatgatcacgcagtgacactgcggggcagcaagtttgggacacccagattctgcacgtgaatctcctgtgttaaactctgcaacctcacggagaatcaatttccgcatctgttacagggcagtagcaagaacaaacaccctgcctctcgggtggtttgagaatcccgtgaattcatagtgagacaatgcgtggcacatttcagtaccatgtctgctgccccacggagggacgggatgtaggaggttttctctgtggtccgagctcaggagggcaaggaggtgagggcaagactggaacccctagaagtgggtggcaagtcacaggtccagggcagggtggcatgaccatggctgcagaggcccctatcccgaagctggctcacagcacctgctgcgggcaggcagaaggggggcctgggggtgagtcaccgcccagcaatgaggcttgagtcacacagggcggggtcccccgttagcccccccagctgctcccacaaaggccctttgagaagagttccccaccccctactcccaccccctaggccctctctaggggtgggctgtggggccgaggccctgctgggctgcccccaggagcccggcctgggtctgggaggcgccagccagtttcagccatgtctgtgaaaagtcaccataggaagctgggtgtcccccggggagggggcttccaggctgcctgagtcactggaatggtggagggtcacacgcgcagggcccacgcacacagcgggcaaattgagtcagactgtctggtggggcgggcaggccaggacgcttcgagtcaggctgagaaggaaacctgggaagagacatggttcttccaagcctgtggcctctggcagagaaagagggtgcttgagggcacatatggtgggtttcaccacacctcctgcctaggcctcccctccttgcctgccccgaaacagtctcccccacctttctatccttcttaaacttggagtgagaaggacagcaagctggatgggattccagggaggcactctactagcggaagaattgagatttttttttttaattttattatttatttatttatatttatttacttttttttttgagactgagtctcaccctgtcacccaggctggagtgcagtagcacaatctcggctcactgcaacctctgcctcccaggttcaagcgattctcctgcttcagcctcccaagtagctgggactacgagcacacgccaccatgcccaactaatttttgtagttttagtagagatggggtttcaccatgttggccagggcagtctcgaactcctgacctcaggtgatccgcctgccttggcctcccaaagtgctgggattaaaggcgtgagctactgcgcctggccaatttgtatttatttatgtattgagacagggtctcattgtgtcgcccaggctggagtgcagtggcacaatcacgtcttactgcagcctcgacctcctgaactcagctgagcctcccacctcagcctcccaagtagctgggaccacaggtgagagcgaccacacccagctaatttttgtatttttttttttttttttgtagagacagggttatgctgtgttgcccaggcgggtctggaattcctgactcgaattcctgccctcaagagttccgcccaccttagcctcctaaagtgctgggattacaggcatgagcccctgggccctgacctgtttgtttattttttagagataggggtgtctccatgttgccctggctggcctcaaactcctgggtttaagggatcctcccgagtagctgggaatacaggcaaatatgtccacacccagctttaagataaaaaaaaattattattatttaatatttatttatttattgagatggagtctctgtcacccaggctggagtgcagtggcgcgatctcggctcactgcagcctccacctcccaggttaaagcgattctcctgcctcagcctctgaagtagctgagactacaggcgtgtgccaccatgcctggctaattttttgtattttttaagtagagacggggtttcgccatgttagctaggatggtctcgatctcctgacctggtgatccacctgcctcggcctcccaaagtgctgggattacaggcgtgagccaccacgcccagcccaggatcaaaattttttaagacaaggtctcaccactgccatctcaagctccggggctcaaaggatccttctacctcaacctccagagtagctggaactacaggtgagcaccaccacacctggctaatttatttatcttgtgggggtcggggcgtgagggtcttgctgtgttgcctagactggtctccaactcctggccttaagtgagcctcctgcctcagcctcccaagtagctaggactacaggcatgtgcaagcacacccagcttatttatacacatttattttattttattttattttatttttttttagagacagggtcttactatgtttcccaggctggtcttgaattcctggtctcaaccaatcctcctcctgcattggtctcccaaagtgctggtattacaggcatgagccacctcggctgaccactttgctttttctatttgttgactgagatggctataaagggactaacagactggtagcctatacagacagcatggataagctgggtaaagggatgattcacatcccaggactgtgggagatttcatcacactactcagaacggcctggaatgtgaaggtatgacttgttttatttctggaattttctttcttttttttttttctgagaccgagtctcgctctgtcacccaggctggagtgcagtggtgtgatctctgctcattgcaacctctgcctaccgtgttcaggccattcacctgcctcagcctcccgagtagctgggattacaggcgcgtgccaccacgcccggttaatttttgtatttttagtagaggcggggtttcaccatgttggccaggctggtctcgaactcctgacgtcaggtgatccgcctgcctcggccccccaaaatgctgggattaaaggcgtgagccacctcgcccagcctctggaattttccatttaatatttttggaccaaagttgaccaaggataactgaaaccgaggaaatcgaaactgcagataagggggacgactgtatacagtcaaatgtgtttagaatattcatagacttatgcaaccatcaccacaataaattttagaacattcctttttttttggagacagagtctcactctgtcacccaggcaggagtgcagtggtgtgatctcggctcactgcaacctccgcctcccaggttcaagcgattctcctgcctcagcctcccaagtagctgggattacaggcgagcaccaccacgcccagctaatttttgtatttttagtagagacagggtttcaccatgttggccagactggtctcgaactcctgacctagtaatctgcccgccttggcctccggaagtgctgggattacaggcgtgagccactgtgcctggtccacaccagctaattttttgtattttagtagagatgaggtttcaccgtgttgcccagcctagtctccaactcctgagctcaggcaatccgcctgcatcagccttccaaaattctgggattagaggcaggagccactacgcccggccttttttttcgctgaggcaggatcttactgtgtagcccagagtggagtgcagtggcggcatcctggctcattgcaaccactgcctcccgggctcaagcaatcctcccacctcagcctttggaatagctgagactgcaggcgcccgccaccacgcccagctaattttttttttttttttttttttttttttgagacggagtctacctctgtcgcccaggctgcagtgcagtggcgccatctctgctcactgcaagctccgcctcccgggttcacgccattctcctgcctcagccttccgagtagctgggactacaggcgcccgttaccacgcctggctaattttttgtatttttagtggagacggggtttcaccgtgttagccaggatggtctcaatctcctgacctcgtgatccgcaagattacaggcgtgagccaccgcgcctggccatttttttttttttttttttttaaagacagggcgttgctatgttgctcaggctgttctcaaacacctgggctcaagcagtcctcccacatcggccttccaaagtgctgggattacagcatgagtgaccacgccctgcccaactttagaacatttccatcacccgcaaaagaaatctcaagcccattagaaatcattttctggccgggtgtggtggctcacgcctgtaaccccagcactttgggaggccaaggcaggtggatcacctgaggtcaggagttcgagaccagcctggccaacacggtgaaaccccgtctctactaacaatacaaaaattagtcaggtatggtggcacatgcctgtagtcccagctattcgggaggctgagttgggagaatcacttgaacccgggaggcagaggttgcagtgagccgagatcatgccactgcactccatcctgggtgacagagcgagactctgtctcaaaaaaagaaaggaaagaaaggaaggaaaggaaagaaaaggaaaagagaagagaaaagaaatcactttctatttcaccccccaacattctcagcctctggcaaccctggtctactttttgtctctgagtataaatgctgtcaacagagttcatccatgttataacaagtgtaacaagcgtgagtaccttattcctttttattgccaaataatatgtgatacgggctgggtgtggtggcccatgcctgtaatcccagtactttgggaggctgaggtgggaggatcacttcacctcaggagcttgagaccagcctgggcaatgtagtgaaaccctatccctacaaaaattacaaaaattagctgggcatggtggtcctcgcctgtagtcccagctactcaggacactggggcaagaggatcacttgagcccaggaggtcgaggctgcaatgggctaggattcttttactgtactccagcctgggcaacagagtgagactttgtttctaaaatgacgagacctcgtttctaaaataaaaatgaggctgggcggggtggctcatgcctgtgatcccaacactttaggaggctgaggcaggtggatgacttgagctcagtagttcaagaccagccgggccaacatggtgaaacctgtctctactaaaaatacaaaaattagccaggcatggtggcgggcacctttaataccagctacttgggaggctgaggcaggagaatcgcttgaacgtgggaggcccaggttgcagtgagccgagattgcaccattgcactccagcctgggcaacagagcaagacttcgtctcaaaaaaaaaaaaaaaaaaaaaaaaagctgggcgtggtggcacgtgcctgtaatcccagctactccggaggctgaggcaggagaatctcttgaacccgggaggcagaggttgcagtgagccgagatcacgccactgcactccagcctgggcgacacagtgagactctgtctcaaaaataaataaataaataaataaatataaaataaaaatgaaaataaaatagaccaaagctatgtcccaggaacaaagtatttgagaagcagatgctgtctcacaaagaagactgagacagagaagggatgtcaggaggatctagtgtcccaaggccaaggaggaaccaggcaaaggtgacagatactacacggagctcaaggacagctacagctgagaacttggcctgactctgaagtctgatatcagtagtgtgatcaggcagccgcctgataagtaaatgggagggaaggcaataaaggcagtgtctaaagaaatatattgtgagccacaaatgcaagccacatatgtaatgaaaacttttttagtagccacatttttttaaaaaagtagcaggtgaaattaattttattttattcacatttatttatttatttttgagacacagtatcactctgtcacgcagaatggagtgcagtggtaggatctcggctcactgtaacctctgcctcccaggttcaagtgattctcctgcctcagcttcccaagtagttgggattacaggtgcgtgccaccacacccagccaattttatatttttagtagagacggggttttgccatgttggccaggctggttttgaactcctgaccacaagtgatccacctgcctcagcctcccaaagtgctgggattgcgggcataaactagtgagcctgccaaaattaattttttttttttgagacggagtcttgctctgttgcccaggctggagcgcagtggcacgatcttggctcactgcaacctctgcctcccgggtttaagtgattctcctgcctcagcctcccaagcagtcaggattacaggtgtatgtcaccatgcccagccaattttatatttttagtagagacggggtttcgccatgttggccaggctggttttgaactcctgacctcaagtgatctgcctgcctcagcctcctaaagtgctgggattacaggcatgagccagtgagcctgccagaattatttttttttttaatttgagacggagtcttgtcctgttgcccaggctggagtgcagtggcatggtctcagctcattgcaacctccacttcctgggttcaagtgattttcctgcctcagcctccaagtagctgggattgcaggtgcctgccaccacacctggctaatttttgtatttttagtagagacggagtttcaccatgttggccaggctggtcttgaactcctgacctcaggtgatccacccgcctcggcctcccaaagtgctgggattacaggtgtgagttactacacttggctacaaaattaattttaataagattttatttaactgagtatatccaaaatagtatccttttaacatataatcaaggtaaatattatgaatgagatatttcagttttttggtactgtcttcaaaaatctgatgtggattttatacttataacatctcaattcaaactgttaggttggtgcaaagtaattgtggttcttgccatcattactttctttctttcttttctttttttttttttttgagacggagtctcaccctgtcccccaggctggagtgcagtggtgcgatctcagctaatgcaagctccgcctcccaggttcacgccattctcctgcctcagcctcccgagtagctgggactacaggcacccgccactacacctggctattttttttgtatttttagtagagacggggtttcaccgtgttaggatggtctcgatctcctgaccttgtgatccacccgcctcagcctcccaaagtgctgggattacaggcataagccaccgcgcctgctttttttttttttttttttttttttgaggaagagtcttgctctgttgccaggctggagtgcagtggcacagtctcggttcactgcaacctctgcctcccgggttcaagcgattctcctgcctcagcctcccgagtagctgggattacaggcatgcaccaccacacctggctaatttttgtgtttttagtagagacggggttgcaccatgatggccaggctggtctcaaactcctgacctcaggtatccaccctcctcggcctcccaaagtgctgggattacaggcgtgagccactgcacccggctgccattacttcgaagaatagctgtatttcaggtgctcagtagccacgtgaccagtagtaacgtcattggaaaatgcagtccagacaggcccgagtcctgcccttgtgtgactcatgtcactcacctatccctaatcccagctctgttggatcctatctttattgaaaaaaacaattttttttttctagacagggtggaatgcagtggtgtgatcatggctcactgcagcctccacctctggagctcaaccagtcctctcacttctgcctctgaatagctgggaccacaagcgtacaccaccacgcccagctaatttttaaaatttttgtagaggccgggtgcggtggctcatacctataatcccagcacttcgggaggccaaggcgagcggatcacttgaggtcaagagtttgagaccagcctagccaacatggcaaaaccccatttctactaaaaatacaaaaattagctgagcatggtggcgggcgcctgtaatcccagctactctggaggctgaggcacgagaatcgcttaaacctgggagagatgattgcaataagccgagatcatgccactgcactccagcctgggcaacagagtgagactccgtctcaaaaaacaaaacaaaataaaataaaataataaaacccttgattgggcatggtggctcatgcttgtaatcccaagactttgggaggctgaggagggtggatcatttgagcccagtagtttgagaccagcctgagcaacatagtgagacactgtcactacaaaaaaatttaaaaattagccaggtgtggtggtgtgtgccagtagtcccagctagttgggaggctggggcaggagaattgccgaaacccaggttgaggcctcaatgggctaggagtgtgctactgaactccagcctgggcaacacagcaagatcccgtttctaaaaaacaaatcaaacaaacaaaaatccctaagccttctcatcatacttaaatccaaactccttactgatcaaggacctataagacgtcacctcctcaaaagccttcccagattgcactttcatcttccaggctgggccttgactctcagcactgaaaactcttcattgtaattggctagctacatgactagccccctgccagatggtggcaggcaagctcctagtctgttttgtccctcccccacttcccatcatctcaccccacatgcatgccaggaacatagtgattattaatgcattaattcactagatattgactaagggccttttttaagttctccagcagtgatgaagacaaacgttgtaggctgggcacggtggctcatacctgtcatcccagcactttgggagactgaggcaggaggatcgcttgagcccaggagttcgagactgccctgggcaacaaagtgagacccacccccatctctccaaaaaaaaaaaaaaaaaaaaaaaagacaacagctattgtgctggcagagctgacaatcaagtacaggagacagacaagaaacaagatgtgtagtaaaacatgtagtgtgttgaaaggtgacagggccaggcgcggtggctcacgcctgtaatcccagcactttgggaggccgaggcaggcggatcacgaggtcaagagtttgagaccagcctggccaacatagtgaaaccccgtctctactaaaaatacaaaaaattagccgggcatggtggtggcacctgtaatcccagcgacttgggaggctgaggcaggagaatggcttgaacccgggagcggaggttgcagtgagccgagatcgcgccattgcacttcagcctgggcgacagcgagactccatctcaaaaaaaaaaaaaaaaaaaaaaaaaggtgacagggttgtgagaaataaatagaggagaaagcaaggtgggtgcaattttgaaataggggagtcggccgggctccatctgtaattccagcactttgggaggctgaggtgggcggattgcctgagctcaggagtttgagaccagcctgggtaacatggtgaaaccctgtctctactaaaaatacaaaaaaaattagctgggtgtcgtggtggttgcctgtaatcccagctgaggaggtctggaatggggtgaatgagggagggagtggagagggtgaggcagagaggagacaggagactgtgcaaagccttctgggtcctggggaggactttggcttttgctctgaataaggtgggagccattgagggttctgagcagaggagggactggacctgacttgggtgctcacaggcgccccgccccggctgctgtggtggggaggggattagggggatggggacagactgtcgggggctgcaaggtgtgcagagaggtggcaactggagcaattctggggagagatgatggaagccggaccagggtgggccttggagaagtcaggattctggatgcattagaagggacagtaactagcctgggagcagtggctcatgcctgtaatcccagcactttaagaggccaagacgggtggattgcttgagtctaggagttcgagaccagcctgggcaacatagcaagacctatctctactaaaaatacaaaaaaatcagccaggcgtggtggcaggtgcctgttgccccaactatttgggaggctgaaagaaatgggaggatggcttgaatccgggaggcggaggatacagtgagcagagatcgtgccactgtactccagcctgggcgatagagccagaccctgtttcagaagaaaaaaaaaaaaaggacagtaagcaaaattgttaatgggttgcatctgttaataaaagtttttgtctgagcagctgggaggatggagctgccatttccggagaccgggaagatggcgggagaccgtttgcagttgaggaaatgagctctgagcccagggcttcgttctggccctgaagtgtccctgcccagactctggtggggtgcggaggaaagcacccacatggcctaggctttgcctcctcggggctttctctcggtcgatgcctgagtgtgcaaactacacccacatctgagtatacaggggcacctccgaagacccccacggcctgacacatccacccagtgtccaatggccacagccttgggggacttcgggggctggagttccgggctgatggagttgagaagggctgcctggctcttacacccaccttgggtccccacggagacccccaaggggacaggaggtgaaatctcccagggagaggttcaggaagagctgctgctgtgtcgcagccctgggctccccctatgagtcagcactggcaggggccccaggaactggggaccgggggtgtgtaggggggagggcagttcccacgccctaaggcgtctggggcgctggggcttcccccaccgctcctcccatcctgtgctgggctctggggatcttcagaggagtctggggggtgagaagcccagggcggattggccactgggccaggatccaggaatcctctctcctggtctgacccagttcaggaatgcagaggccgcccgccccggcaaatgcgttgcagcaagaaggagagttagacgtagagaaacaccgagtgagttggacatttgtgtggacggcacttctagggggctttatttaagaaggggcccttccttctggggactctgcatttgagcagtggaggctccagcctggggtgtccaggcagagtcctcagctaccgtggagtgggaggtggcggggaggagggggaggagactgcgctgagagctgagatcagtcccgccggcctccacagctgggagggcgctggactctgctgccccctgctggtggctgcaggaaattcagcgagcaggacagctggccggtcctggagaagagacggggggaaaggcctcgcacagaaagaattccagctctgccttttttttttcttttttctttttttttgagacggagtctcgctctgtggcccaggctggagtgcagtggcacaatctcggctcactgcaacctccgcctcccgggttcaagtgattctcatgctttagcttcctgagtagctgggattataggcgcgtgccaccacgcccggctaatttttgtgtttttagtagagaagagatttcaccatgttggtcaggctggtctcgaactcctgacctcgtgatccgcccgcctcggcctcccaaaatgctgtgattacaggtgtgagccaccacgcctggccccagccctgcctcttacaggcggtaccaccttgggcaagggcaggccccatctgggcctcggttgcccatctgtggaaagggcagtattcacttcattggcctgctgggaagaatctgagatgatgataggcattcctgggaccaggaagaaggttcgaagatacagctggggagaactctaccctgggcccacccttctaaagagaatagtccctgcctcaagggttgctctggtctggatgggagacgaggctcatacacgtctatgagtggatgaatgagtgaatgaataaatgtgaatgttgcatattccaaagcaagtccctccccaaccccttccgcctctttttctaagagaggaactctttccccaatacgctcttttttttagagatgaagtctctgtctgttgcacaggctggagtacagtggcaccatcatagctcattgtagccttgaactcctgggctcaacggatccttttgcttcagcctcccaagtagctgggactataggcgctcaccaccacacccagctaattttttttttaattttatttttgtagagacagtgtctcgctgtgttgcccagactggtcttgaactcctggcctcaagcgattctcctgcctcggcctcccaaagtgctgggattacaggcttgagccactgtgcccggccccccttgcctcttttctgtaagaagggctggccggcaggggggcgggcggcacaggagggccatcaacagagctgactggccccccccaaccccatggaggtatgattactagattgcaatgaactcccattctctcccctgcacgtgtctctccatccccactctgggagaagacttcctttgggagaggttaggtgtagactacagctggcccctctaacctttggtggggttgggggtcgggggagtggtcctggagacatccactctcctggacctggaaccagactttctgggctgagacctgaaggcagctggacgatgtgggagggtgaacctgtcaaggagaaactgaggcaggactgtggtggaggaggctgaaaggaagtgaggggtgcgcgatcaggtggggaagggccatggccccataagggttaaggtctgggcttggaagggggccagtcaaaggtttctccatccccctctcagactggggtgggggataaataaacagaatgagaaatctgtcagctcagcccgggccaatgggaggctgcctggcgccatggtttgccctgatgtgaccttcctctaccagccgcggtggccactgcgggcaggggcagtgtgtggagcctcagccagggtacgatcattccagccttgtgcatgctcttatacctgggcagggggaggggggatgtctggggaggagtaccgtctgtgcaaggatctttgggagatccggggagccccatcctttgtacagcttgcatgtggtctgtgcacctggcctgtatatatgcttgtgcctcatggtcccaggtacacatccccacgtgcccctgaattgcgtgtgtccatgtggacccctgtggctctgggacctgctgggggtcttgtgcatgtggctgttggctgtgtttctctgcctctgcgactggtccatttgacccgagtggctgtgcatatatgtgtgtgtctgtgaactttgtggatctgtgtctccatgggtgtgttctggttctatgtctatatccatgtattaggttattttgtgtgtgtcacggtgctcctgtggctgtgtacctggggtactgtgtgtgtatgttggggggtatatctcaggtctgtggataccccagtgcgtctgtgatctcctgcgtgtccgtgtgtcttgtgtgagctgtgcgtgcccggggttcagccgcgtttctgcatatttcggttctaaggaccttccctcctgtcctgaatgtggtgtgtctgtgtaccttgcatgtgtctggtgcccccgggtgtccctctgtgtgtagctgggttttatgaccaccctcgtgcggcccggcacgcccgcacgtcccgccaccccctcccttgggtgtgtgtctcgcagccccctgcacaccgttccctatgtctgtggcccgcgtgcctttgtgcgcgtgtgctccccccggcgcctttgaggtctgcgtgcgtctgggtccctgcgtgtgcccgcccgcgcccccgtgtccctgattcccccgcgcgggccccgggagctgcgttttggagacccacgggcatcccccgagtgcgtcccggtgcgcctggcaggaggcctcgggacgcgcacggccgcggctggacccaccgcccggcgcggcgcggggaggagggagggggcggcggcagcggggagcgcgggcacgtcaccgagacagacaggcgggcgggcggcggcggccacgggttcgagccggcgccggagccccgcggccccctccccccccccgcccacggcctagggagcccccgccctgccccggagccgccgaaatgcaatttcccgtgcaggcgcctcgggcccggggggcttttccgggcgggttttggaaagaagagggggaaatgcggcggcggccccaatcgaggtgagcgcgggcgccgggcgggccgggggcacgggcggggcgggggccgcccgcgggcagggggcgcggcggggcggggcgggacgcggccgcagccccctcgcgcacctgctcgcagccccggggcgggcgccccggcctctgcggcccggccctccattgttgttggggcttggaaggggggcggggaggccccggcggcatctctgcgtctcgcctttccggagagggggcgccgggagggtcggactctgcaaaggggacagacccccgagtcccggagccggggccgccagggggagggcaagcggagatgccctcgcggggcggggacgcgcgatggggggcgtggggacagcggcgccccgaccgcccgacacctgaccgcgcgcggggaggccacgggccggggcggcggcgagctttgttcttgggggcgcggggcgggtggggcgctcggaaatcgaatgccagaagagagtacggcccggcgcgcgcgcgttcgtgaaggctgctccggccaagttcatgggcgctcgggcctgcggagaccgatcctggcgggggccccgctcaggcctggccgcgggctgggggtgctgcagccgcgccacctccggaagccctggcgccctgcgcgggccgcccctccggcctgtcattaccggcagcagctgcagggtatttactggggccaaggtttgcgaacaggaacccgccctccaaaactggccataaaaagggaaaatggccccgaatcccactgccggggagcccttttaaagctacagggcgcctttcacggcgacctgccctggagggcaggctgggggtgggggggtggaaaagacacctcattggctgatagggactgagacgtcccccccacggtcccacacttcggttcccctccccccatctctttccctacccattccacacccctggactgctcacagatgcattaagccagccacgattagatattcccaaggccctgatggagacccccaaaattacacgctatacacagacatacagcaccccgattaatacgcagtcgaaagtgatgctgacacacacatacagtccccacaataacactgccacgtgtgtagacacgtcacccacaagggctcggacatccagggatagtgcccattgaaaggctgtcacacagaaatggagccaccaacgaaggcagctacaacatagacacagcctttcgcataacactgacacacagaagtgggtgttcacccacagcatgtcactcagggtagcaatgacaaacgcagatccctaaagcccatcagtcaggcacacacagactccgactccatcgttcacaatacctgggacacacacagacatccatgtgtcctcccaaccaagttcacacctgcacactcacagtcacccacagtcacccccaccacacacacacacatacacacacacacagacggtacaaggcctgcagaaacacatctgacagcaggtcacacataatcttttttatttttatttacttatttattttgagatggagtctctcttggctgcccaggttggaatgccgtggcacgatctcccggattcaagcaattctcttgcctcagcctcctgagtagctgggattacaggcgcgtgccaccacaccaggctaatttttgtatttttagtagagatggggtttcaccatgttggccaggctggtcttgaactcctgacctcaggggatccgctggcttcagcctcccaaagtgctgggattacaggtgtgaaccgccgcacccggccacagtttcctttttatttttttgagacagggtctcactctgctgcctaggctggagtgcagtggcacgatctaggctcactgcaatctaggctcactgcaatctaggcccatctcctgggctcaagcaatcctcccacctcagcttcccgagtagctgggagaacaggtgcgcaccaccacacctgggtaatttttgtattttttgtagagatggagttttgccggttgcccaggctcgtctcaaactcgttgagctctagctatccacccacctcggcttcccagagcgccgagccaccatgcctggcccaaatttttgtttgtttgttttgttttttgagacagggtctggctctgtcacccagactggagttcagtggcacgatcatagctcacagcagcctcaaactctcagactcaaatgatcctcccacattagcctcccgagtagcaggtctcagtaatcttgatatacacacacatacagaccacccccgcccaagaacacaactgcacacatggacacacagttgttcacagtaaaatggatcctcttagccacccacaaagacactgtcacccacaaagatatatgagcacgaacccagtggccatatgcccatcgtcacctaccctgagacttgtttaggcactcagacacctgcacatctacaataatactgacatacacacagacacagtaacacatgcatacacactggcatgcatagactcacggggaaatgacacacaggcaggcagaaatcctgtcatctggatgcccacaaacccaataatatttttttttttttggagacagagtcttgctctgtcacccaggctggagtgctctgtcacccaggctggagtgcagtgacacaatctcagctcactgcaatctccaactcccaggttcaagcgattctcctgcctcagcctctcgagtagctgggattacaggcgcccgctaccatgcctggctaatttttgtatttttaatagagacagagtttcacaatgttgtccaggctagtcttgaactcctgatctcaggtgatccacccacctcggtctcccaaagtgccgagattacaggtgtgagccagtgcgtccggccccaatactcatttattgagcatctgttatgtacccagcactgttctagcactggggatgcagctgtgaacaagagggaaatctgaacgagcacagtggttcacgcctgtaatctcagcactttgggaggccgaggtggcaggatcacttgagatgaggagtttaaaaaacatattagctgggcgtggtggtgtgcgcctatagtctcaggtactagggaggctgaggcgggaggatcgctttgagcccaggagtttgagattgcagtgagctatgatggcaccactgcactctagcctgggtgacagcgagacctagtctcttttaaaaaaaaaaaaaagaatgaaatccctgtcttcccacacctgacattttagtggggaatgggatgggggggacaccatgactggatgatacagactccagtcactcatagtgacaccagcagacaccagacacccacgcacactggctcacatgtcgacctggaattacacacaattagcctgatatacacccacagcaatgctgacatccacacacaaacagaagcccacaggaacttacacacacacgcacacacacagctggtggagagacagccacctgctatagcacactcccacctggacttacagacacccacagaaccccccaaaatacctcagcaaagtagcttggacctgaagcccctatttatagacccatagaaacatcctacaagagttcttgagacggagcccaccctgaccccaaacccagggtcacccagcaccataagcctcagtagaagtgtctgaatttcccttattaaaaaatttttttaatttgttttttgtagagatgaggtctcactgcgttgcccaggctgatcttgaactcctgggctcaagtgatcctcctgcctcggcctcccaaagcgttgggactacgggcatgagccaccgtgcccggcctgaattctccttcagcttggcccctccatagcccccaatcccattcctggagaagccagaaccttctcgccttccccagccctggcctcacatctggcaggcctgggaaggaagctgggctcctagcccacccaccgcccacgggctgggtgggacagaggagccccttgtctgaggacccctggcatgaaagactcccgcagctggaaaggaagtgggggaggtggcctgcggagggtggggtgggaacctcagagcccacgcaggtatcactgaaacgagacacccctgcttgccagtctagacagcctgggccatcaccgtgaccccacggagacccccacagggctcttggtgtcgctggaacccccataatgggctctttgtctgccaggtcctgacgacctcccccaccccgtgtcccccttccaggcccaagtacacacacacacacacgcacgcacacacacacacacacgcacacacatacagttacatacaacacacagacacacaggagcatatatataggtactcatgcgtgaacatacagagacacccccaacccccatgcaccaaggctcagggttgagatcgagaggagacagcttgccacctcccaccctgagggacttcacagtcaagacttcaagaatcacgggcaggacacacgggccgccagacacccctgggagcttggagacctggccttctagccatgcccaccttgttcttcaactatttttttttttttgagacagggtctcactcctgtagcctgggctggagtgcagtggcgtgactgcgtctcactcactgcagcctcgacttccctggcttccgtcagcctcgacttccctggcttgcgtgatcctcccacctcagcctcccaaatagctgggactacaggcgcacaccaccacacccggctaagtttttctatttttagttgagccagggtttcaccatgttgctcaggctggtcttgaactcctgtgctcagtcagtcttcctgctttggcctcccaaagcagtgggatgacgggcatgagccacccggcgcccagccttgttcttcagcttgacggtagagctgcctccatccatccatccatccatcacttgctcacctgcctctgctaggacttctcacctccgactctgatcccccgacttgtgccagctgccctgcaccttcctggtgctatgtgtgggggggtgggggcaaggccctgggatagcgtggctttttttttttttttttttttttttgagacggagtctcactctgtcactcaggctggagtgcagtggctcaatctcggctcactgcaatctctgcctcccaggttcaagcaattctcgtgcctcagcctcccaagtagctgggactacaggtgtgcgccaccatgcctggctactttttttttgtttgtttgtatttttagtagagatggggtttcaccatgttggttaggctggtctcgaactcctgacctcaactgatctgcccgcctcggcctcccaaagtgctgggattacaggaatgagccaccgtgcccggctcataacgtggcttttagagggccgtcccccacaccccacttatccccagctcccctgcccagaaagaccctcccagctgcactggggtcaggtgaggggtcccaggaactaaggataaagaagaagcaaaatgaaggccctgaaagacacccctaccccccatgcactgaggctcagggtcacaagcaggaggagacagcttgtcacctcccactctgagggacttcaaagtcaaaccagcagacagctgcaaccagacaagcagggcagggctgcagactccctcaggggacaggaggggacaggtatcacggtcaccagtcacagacaggagatggagatggggggtaaacagctagacacatacaggcagatccagacagtttgaggcaggtgcacgggctgggcaggagacccagatggagaacagatgtgtgaggggcatagtccgacccagacagacgaccctgggatgaccaagagacaggtggacccagatggacactgagggccagaagcctgcacggaccacaggcaaagaagagagatagtcagacccaggattggggctgccggcctcctgtcgccccagccccagcttcctggccttcaagaccagacccctcttccactgtggtcttgtgtcttgtcttagggagaaaccttacagggaacaacctccttggcagttcaaggccaaagccctcagagggaggagtgggaggcagaaaggacacacaggaggtgtctggggaaccccctccaacatagccagaatgtctcctgcctgatgaccccccgcccccaacattaaagctgttcacagtcatcaagaagaaagattcctgtgggacgaggtggctcatgcctgtaatcccagaactttgggaggcccaggagttcgcgaccagcctgggcaacatagtgagatctcatctctacaaaacttttttttatttgtttgtttttgttttaagttagccaggccaggcacctgtgatcccagctacttgggaagctaaggtgggaggattggttggggctgggaggtcgaggctgcagtgagctgtgattgcgccactgcactccagcctgggcaacagagcgagaccccgtctcaaaacaaaacaaaacaaaacaacaacagcaacaaaaaagagaataaagatttttcttttttaaagaaacggggttttaaagaaccactgctgggtgccgtggttcatgcctgtaatcccagcactttgggaggcccaggagttggagaccaacctggccaacatagtgaaaccctgtctctactcaaaatacaaaaattagctggccatagtggcaggtgcctgtagtcccagctactcaggaggctgaggcaggagaactgcttgaacccaggaggtggaaattgcagtgggcagagatcgcgccactgcactccagcctgggtgacagagcaagactccatctcaaaaaaaaaaaaaaaaagagagagagagagagatgggggtctcactgtgttttccaggctagtctcaacttctgggctccagccatcctcctgcctcccaactagctgggactacagacaagaaccaagcttttgaggaatcttgagagttctggactaacagagccacttaccttcccagtccacaaaatgggtatatcctgctcacagcgtgatgaatgtagcgttatcatcagtaatgtaattattaacacctgtgctcccaactcactctccttcccaagtcctaggcgttctcctccttagaatgatgatccacaaggcaggggaccggccacctccctcggaagggcctggacacctggggtggaggtggcggataaagagaagccgatcaggcccccccactccacagcctgaatgggaggatctgctggacgtggcggatgagctgcgagagagggcgccccactccagctccagacagaggggtgggaacgtgaccccgacccggggcgggtgagagggcgggctctggggaaagggctctagaaggtgccgggaggcgggaggggggcttcgggagggcgagttagccgggatcgggcttgaggggccctacgaaattcggtttgggggcgtgcccggtcggggcggaccttagtggggggttgggcttcgtgggggcaggacgcagtcccggggcgtctatagagcaggcttttgtggagggctctaagggggcgggccctaagggagctgggctctttgaggactggcttaggggtttggcggtgggctccgtgggagtctatatgggcgggttttagagggagtgtgttctggggaacaggtcaaaagcgacggggctctaaggggcagggcctgggctggggccttggctggtggctccagactgtgggtggggctctcgggggcggggctctcgggggcgcgtcctcgggggctcggccgggttccgttgccaccaccgtgaggggtgtggtgggggggtggttcacgcagctcggcacacttgggggtccctcatctaccttggggttatgccaggcggttattttgggcctcagtattcccctcggtgaaatgccaggggccaggaaattacttatttttttgcgacgacggggtctcgtcctgtgacccaggctggaatacagtggcgcgatcacggctcactgcagcctcgagcctcgaactcttggggtccaagcgatcctcccatctcagcctcctaagtagctaagactacaggctcactacaccacacccagctaatttttttgtagggacaggtatctcgctatgttgctcaggttggtctccatctcctgggctcaaaagatcctcccgcctcagcctcccaaaatactgaattacaggcctgagccgcagcacccggccatgccgggtgcaccttcctaggccgtccgcagacccaggtcaggggcgaaggcgcgctcgcccatccctggtcgtcactgcttggcttgcggggggtgggagataggggtgcgtacctgtaggcctgggggcacccggggcgggggggtggtcgccgaactctgtgcgatcactggaggaagggactgggggtcatttgagggatgaggaaatggagagggggcgccgcagccggttttgaggcccaaggggcagcccccacgtggctgcgcggactccctccggaagtgcccgagttcagatgctgtgtgaccgcgcacgcggggcgagcggcgccctctctgaacctcctgcctctcccctgtctagtggggccccagtgcacttgtaaagtggagagacctgacgaccccccacccccaagcgctccactcacgctgttgtgattcctaaaccatcgtgcccggaactcagtgaagctcccagaacgtattacattgtattaaaatggcttgtttatctccacgttgcatcaatgccctcggggccaggatcctccgttgccagacttcccgggaacacttggaatgcctcctccacctcggactagcagtggcctttggcctcagtctccccagttgacaaaggggggtaatctgcacctccaggatcactttgtgaattacttaaggagcgggcttgaggccagcactcccctgcactgctacatctccatccccatagcaaaggctacattttatttactagcatttatatttgccttgtgtttttcccagatctaggtgcaaacagcacctgaaaagcgtttgtttatttcatgagagaaaaggggttccttactctctcctcctctccctcttcatgctctctggttccctgccacctaccccacccccgactccaggtcccggaaaatttgccaagggtttgggggaacattcaacctgtcggtgagtttgggcagctcaggcaaaccatcgaccgttgagtggaccctgaggcctggaattgccatcctcctgccggtgactctgaccttccagatctaggggggcctggggagcccccaatccagcctgggcacgtcccctcccctaggccacagccgaggtcacaatcaacattcattgttgtcggtgggttgtgaggactgaggccagacccaccgggggatgaatgtcactgtggctgggccagacacggcttaaggggaatggggactggggacaggaccccccaccgccacagtcactcagcctgttttttgccctgaccccaaccactcctctttggagaggagagctggtgtctggaatctggatgggctctggctggatttgggactaaatattagagggttgggggtaaacaggctggggcagggcagctaaaatccccttttttttttttttttaagacagagtctcactctgttgcctaggctggagtgcagtggcccaatctcagctcactgcaacctctgcctccagggtttgagtgattctctggcctcagcctcccaagtagctgggattacaggcatctgccaccacagtgggctaatttttgtatttttagtagagacgagatttcactgtgttggccaggctggtctcaaactcctgacctcaagtaatcctcccccctcggcctcccaaagtgctgggattacaggcatgagccactttgcctggcctaaaacccctttctgaaatgtgggtggtaagttctgctccgtggagtgctccatagttttgttttttaaattagagacaggatctcgctcttgtcacccaggctggagtgcaatggtgtgaccttagctcactgcagcctctaataactggagtcaagcgttgatcctcccgcctcagcctccccagtagccggaaccacgggcacgcaccaccacacctagcttatttcgaaaaagtgtttttgtaggaacagggtctcaaaacgttgcccaggctggtctccaactcctaggttcaagcaatcctcctcggcctctcaaaatgagccacagtgcctggccaataaaagtttcttaaatgaatggatgggtggatgagctgtgtaagcggcacagcgtctctcctctgtgtccaagtcctgagcacaccctcccctcctgggactgagctgagatctcatctcggggaggacactgaagacctgtaggtactaggggtcccctcctaacagcccaacttgctatcccccacctcccaactccagagggttctttctcacccctctgcagcccccgccaggaaagggctccctccccagcacctagcctcagggggccccagtaactagaagaaggaggcagatgtggtgctttttgttgttgttgttttgagacagagtcttactctgtttcccaggctggagtgcagtggcttgatcttggctcaccgcaacctctgcctcctgggttcaagcaattcttctgcctcagcctcctgagtagctgggatcacaggcacccgccaccatgcccagctaattttgtgtgtgtgtgtgtgtgtgtgtgtatttttagtagagacagggtttcaccatgttagccaggctggtctcgaactcttgacctcaggtgatccgcctgtcttggcctcccaaactgttgggatgacaggcatgagccaccactccctggcctggtgcatgtctttataaataactggatgggcaggtggcttcacacctcagtttgctcatccattcaatgggggttccactaagacaaccgatgtgaaaactcttggagggagaccagagctgggggccggggggcatgatccttcccccctacccccgcaaccagcccatgagcctgggactaccacactcctttcagagacagctggagcatcagcaacctcccgcctggacacacacacacacaaagaacccaggggcacctggccactcccccgcccaggggaaggaagaaaaagttataaagaagttactaagttaacttctttaagttactggtaactgctagtctttgggggtggggtttccaacccattctccccatcctccagtggggctggagggctaaggactcctacaaggaggggaggcagggtagccccccaattccctggaggtgtgtacggggggctgtggtgcacctcgcaggatgcccccccacacaccctgtgtcctgtagtcccccggcacagccagaggccatacagccctttaggaggagtattagtggggcaccaggcccccctgtgacaataaggaacctcccacagcctgctcctccctcttcacacccccttggaggtaaaaggagggtcggccagcacagactcccaggctccagagaggggaaggaaggggcagcagagaggggtcagaaggagggagcttaagccaggcagggttacttgtctctgtgactccttccgcctggcacatgctgcccagctatggggacctttgacctgtggacagattacctgggtttggcacacctggttagggctctgagtgggaaagagggtcctgaaaccaggctgagcccccagccagagccagagccaatgctggagccggtgtcagccctggagccgatgccagcgccggagtcggtgccagtgccgggacccaaggatcagaagcgcagcctggagtcctcgccagctcccgaacgcctgtgctctttctgcaaacacaacggcgagtcccgggccatctaccagtcccacgtgctgaaggacgaggctggcagggtgctgtgtcccatcctgcgggactacgtgtgtccccagtgcggcgccacacgtgagcgcgcccacacccgacgcttctgcccacttactggccagggctacacctccgtctacagccacaccacccgaaactcggcaggcaagaagctggtccggcctgacaaggcgaagacacaggacacaggccaccgccgaggaggaggaggaggagcaggtgcctgcacaggtggctgggggggacctgtccgagggtagtggctgagcccccctgtgaagtaagattagccccagtacccacctccaagggttaggggaagaccttagagagagcttagaacagcagttgattttatttacgtatttatttatttatcttgagacaggtctctttctgttgctcaggctggagtgcagtggcgccatctcggctcactgcaacctccacctcctggattcaagcgattctcctgccccagcttcctgggtagctgggattataggcgcgcgccaccacacccggctaattgccaccatgcccggctaaattttgtatttttagtagagatggggtttcaccatgttggccaggctggtctcaaaactcctgatctcgtgatccgcccacctcggcctcccaaactgctgagattacaggcgtgagcaccgcaccgagccagtttgtttatgtatttatttatttatcttgagacagagtctctttctgtcacccaggctggagtgcagtggcatgatcttggctcactgcaacctctgccttccgggttcaagcgattcttctgcctcagcctcctgagaagctgagattacaggcgcctgccaccatggccagctaatttttgtatttttagtagagatggggtttcaccatgttggccaggctggtctcgaactcccaacctcgtgatccaccctcctcagcctcccaaagtgctgggattacaggcatcagccaccacatctggcccgcagggttattatagatgcagaaagaagacttttattttatttatttatcaatttatttttcttcctttttttttttaatttttttttttgagatagagtctcgctctatccacccaggctggatggagttcagtggtgcgatcttggctcactgcaacctctgcctcctgggttcaagcgattctcctgcctcagcctcccgagtagctggaattacaggcgtgcaccaccattcctggtgtgttttttttttcctcccatagaaacagggtcttactatgtttcccaggccggtctcaaacacggcttaggtgatcctcctgcctaggcatcccaaaatgctaggattataggcgtgagccaccacgcctggccccagtgaggttttctttctttctttcttttatttgattatttttctgagatggagtcttgctctgtcacccaggctagagtgcagtggcgcgatcttggctcactgcaacctgtctcccgggttcaagcgattctcttacctcagcctcccgagtagctgggattacaggcacccaccaccacgcacggctaatttttgtatttttagtacagacgggatttcaccatcttggccaggctgagtcttgaactcctgacctcgagatccacccgccttagcctcccgaagtgctgatattacaggcttgagccaccatgcctggcccccagtgaggttttaaaagagaaactcgttctagcaacttaaattgcctttgaggaagtcagctaacagaggaggggccagtctaactaggtgtgtttgggcactgcctcccccagcagactgtgagctcctggaggatagtgactgggagaggacgacccctcccaactactctcaggcagctttgcagtgaacatttcttaaagtcatgaaagggtcaggtgtgatggcttacacctgtaatcccaatactttgggaggccaaggcaggaggatcgcttgagcccaagagtttgagaccagccagggcaacatggtgaaacccagtgtctacaaaaaattagctgggcatggtagtgtgtgcctgtagtcccagctacttgggaggctgacgagggaggatcgcttgggtccaggggacagaggctgcagtgagctgagatggtgccactgcactgcagcctgggcaacacagcaagacctcgtcttaaaaaaaaaaaaaagcactggtcatggtggctcatgcctgtaatcccagtacttggggaagctgaggcaggtggatcacctgaggtcaggaattcaagaccagcctggccaacatggtgaaaccccgtctctactgaaaatacaaaaaattaactgggcatggtggcatgcgcctgtaatccctgctactcggggggctgagacaggagaatcgctagaacccgggaggtggaggtcgcagtgagctgaggtcacgtcactgcactccagcctgggcgacagagtgagactccgtctcacaaaaaaaagaaagcatgaaagactgcctccaggagaagatagtgtttcctgtgaggtttgatgctgtctcactgggagacgctggaggccaaaaggacatagggaagatggtgtcctgcggccagcctttctgatgaacaacttttgggagtaacagatccggggaccccagagcacggcggccacgagagggcaccacagtcgcagaatcggaactcctgtgctttgtctcgggctctgggtcccagcggggccgcccggcggagccagagacgtcacggggtcgctgtctccggagcagcccctgggtggcgccagaggtccagcaggcccggaggccgagtccgtgggcaacttggggagcgttgagtcatcgcctgtgattaagcatttctctccctccccctccactaggtttcagaggtgccgggaagtctgagccttcgccctcctgctctccctccatgtccacctaggaggctgcctacacctgggcaagggcacccgggctcggctggatttccaggaagacccaccctatgacgactgcccccactcccagaccctccccccagcctgggattgagccctggggatgacccggggttggcaagggaagagctgaaatcgccctgtccttggggaccccaccctttgtgccatctgccgtttccctagtgctgggcatccagtcagccctcaataaatgcttatgaatggatcaacaacagacaagccctggtcttgggacaaggtgtagtgtgaaccttgctgggagtcctgtacctagatctccccttctccttctttgagtttcggcaccctggggtgctggggtgagctgctttgtgcagagaaacacaagtgggtgccttggggtagctgggggggttcatggcacctcaaagccagatcgacatcatgagaccctttctgtggacatttggtctttcagccaccccctgcactgacatgcaagatgggtggactcctcccatcccacccccagctccgtactggaggtgggggcttcatttgaggaagaaattgacacacaactagacagagcccccccccccgacatcctcatcactaaggaaggtgaatgtttatgtcaccatggatgccccagtgacaagccaggcagtttagagcaagggagggacatttagggggcagggaatgggaccatgtcctgggtgggcttgggcaggagcagaaggatggggctgttctggcagggcgggggggaaatgcatgtgggggaatccccacacccctgcctgcctcctccacctccagatcttgtcctgttggggcaacaggtggcagtgctcaggaagccagtgcgcccactgtgcagtccacattcctaccccgcccccgtcccacaaaccagccctgaggcctgtggtctggcagcggggagcaggaatcgagctctttgctgtcccctctgcccttggctttccgacttaaaagacttaaattggaaccggaggccctggggatgggggtgggctcttgcagacagctgggtcgtggagggggaagtggggaggaggagaaagaaaacagaaggatcccagcggctcccagggtctgggaatggagttacagtttcctagggcagagccgctggggctggagacccggggaactgggcttacaccagggcatgtcctggtggacagggggctcacctgggtgtgaacccaccctgctctttcctcccctcctgcatcaggtctccagggtgtaaggctgcagggtgggaggaggaccccgcctgagccatgggagctggggtgcaggagtcacagagtgcttcatgatgtcgaaggtccagtcagcctttcagtgacagatttcacagaggcattgttttctgtaaactggggatgacagcagcccctgtggttgctaacaggactgtcatctggctcgagaggcttgcgtgggatgagaaatgccacgacttcagccatgtttgcatccataacctcctgggatggcctccttcctgtctggggcccacaggcagcttgtcctggaggatgggccaagccaccggagcgcaggactcaccctgcagctggatgatcgcccagggcgtctcttaggcttcgacccgcgtgtatgctcaagagcctgcacacagatgtgggcacacagtcacccacccctggagattcgccccccccttgctttcccagggaagctgaggcataaaactcgtagagggcgaggaggaggaagtgggtagagaggtttgtgggcggaaggtgaaggaactgaagcctcagccccaaacagcaggtcacggggcctctacagaatcatttattatgggtcttcccagaagaaataaaatggaaatggggagaaagaaaacaaagggagctctcttctcctccaggaaagaaacaaattctgaaccatccatacttggctcaggaccctaaaatttgcaaatccggacaggatgggccctgctcagaggtggccagcttcctggagcccaggcccgcttgaagtcactggggctgtgggagacacagtttccctccctgaagccaagggtggcaaatgaccttgaccctggccaggtgaggccaggacctcacggcctcctttgtgttgtccatggaagaccaacttccgggcaactgaagggaggtttgtagggtccactaggaccccctggagcatcttggaggaggtctgcggacatgggggctgggtggcaaaggaaacacagacctcaaagtggcctacaactccctccagggtgggtcccctcgagggatattcccaggccccttggaagggtaaggcaggggggctttgcctcccagctttgtcttccggtagttaaggcgcttgaaagcttccaggtcccggtgggtgcccatgatcagccggctgtgggggaaacacaggcatgcgtgtggggctcagtggtcaccaggtgacagagggggccgcgcctcacagccacatggtcaccaatgactcaggtgcacacacacggctcacacacgtgcacataaccagaaagggcctgttgtagcacaggctgggcctgttgcagcctttcttcagagcctgtgttctgcaaaggacgggggaggggggccacggtgaggacccagcagcagtgaggtgcctgaccctcgctgcccacctaggggcttcacacttcagtccctccctgctcctctgagtccccactggcctcccgcagaccctgtgccgtgagtccaagcccaccccgtacttcaggttggagagctcaacgatgaggccacgcacgacgttggtggcatcctccatcctggaggcctcagaggcctggatccccacgaaggtcctggccagcagggaaggaaattgagagtggcccgacctcactggactaccagagctctccagtgggaggggcttccgcagggcctcgcgccatcttttccaggtgtccagcctgtcctcctctgttcacgacagaaccctgatggccaacccagctggctccactgcccagcaggcccagaacccaaccgcttctcccctacctgccctgccctctcaggacgctgctgccaccgcctccctatctcctgcccctgtggcttgtcccccacaggcactgggggctgtgaacttggaaacctagctcagaggcaagccctctcctcccgcagctgtgcaccacctgcctgccccgtgccctcccctcatcccccgcttctcccctcccctcggctctagccacactagactcctggccattccttgagcacctctcaggattctggaatgttctttcccaaatgtctcctcctggtggtggcttccctgattcctccttacattttaaccccttctccgctgcctttttttccccaacactctgccatctgactatctaatctgctgtctctcatgtccccacaccccgaatcccccagtagcattcaactctgtgttttgtcccacactgcctccccagcacccagggcagtgctagaaaggccagcccagatggcattcatatccttggaaggtttgggaggtcaaggtgggaggatggcttgaacccaggaattcaagaccagcctcggcaatgtagtgagacccccatctctacaaataatacaaaattagccaggcatagtggtgcgcgcctgtagtcccagctactcaggaggatgaagtgggaggatcagttgagcctgggagatggaggctacagtaagctatgatcctgtacaccagcctgggcaacagagcaagactctatctaaaaaatatcccgccaggcacgatggctcatgcctgtaatcccaccactttgtgaggctgaggcaggtggattacttgaatccaggagtttgagaccagcctgggcaacacggcaaaatcccatctctaaaaaaaaatatacaaaattagccgggtgtggtggcgggtacctgtaatcccagctacttagggggctgaagtgggagaatcatgcgagcctgggagatcgaggctgcagtgagctgaggttgcaccactgcactccagcctgggtgatgggagtaagactgtgtctcaaaaaaaaaaaaaaaatcacggaagagccaaggagccacagaacacctcccccaccccacagaacaggtgccactctcagacacaggcagtacaggtggccaggcgggtaagtgggggccacccgccctaaacccgcccatgccccaggcttcgcagcacctccggggctgtcactatggaaactgctgtcctgctgctcctgccttggtcaccctgaggtgtctggcagcccctgggtcttagcctcttgtgtgtgtcattcagcctcaagccaccaaaccagacccggggccctctgggagcttccagacatccaggacggtggggaggggagctgcattggccctgggacgctgtcggagattcagatgtgaaccctcccggctcttcactcaaaccacagcgggccgctctgatgaactgcctctggtccacgtgcaggttgtgtgtgtggctaagggaggtggccagtggcacagcaggtacaagtcacagggagtgacggcaggaggcagggacagagccgccctctgctaggggaggagaaggaggaggagggtgtgggggccacacacagccaagggctgagtcccaaaccctcctccacccctgccagacagaaacagaaacttggccataaataattgataagctgccgcctctgcagagaggcaggttcaagtgccaggtaacagagagggcagccacccagcgctggcttcgaggagggctgtgggagggcacgggaggaggggacaggctgcggagaccccgggcatggtgcgggggagagggtgccctcctcacacacagcaggctggaggacggctcactggtggcctgtgggagggaggaggtggttcgcctagggcaagagccaagtggggaggggaggaggtgagggcaggttagactcactcgggtgcccgcctggtgccagagctaggaacagctccaagatggtctcagccaacagttctgagccctgtctgggtcccctccccttcccagggactcaggaggaagctttggcccctcttcccagagagaaagagcccacagagccggaggcactgtcccagggctcctggggagcttctgggtggggagatgctgggttgggtgtcgatcactggtcactgtcgcccattctctgctttcggggagcaggggaatgtatacagtttgaaagacagggctcagctcccctgctggactgaggaagtcgaggcccagggagggagaactggggtctgtctcctccatctgtcaccctccttggtaaaatttgtgagggtcctggagccacttctcacccacgccacacctacctcggctgggccttggccactgcaacagggtctccattggcatgtgagctggggcccggccagcaagggcccggcttgttccccgaaggaaagagctggaaagagagcacaaggtgtgagtggtcgaggcctgggtcgggcaagctctgcacaggggaaccagaagtcacgctgatgcttttggcttcaccgcggccacagcaggtcacatcggggctggctgggactcctgcagaggaagagcggtaacggggaggaaatccacgatgggtagacccgaggctaccagcctgggctgcgcccgtcctttccccttggaaagagaaaggccacagccaaccctggtgtccgctcctaggcccgggcctcccacaggctgatctgggcagtgggggcaccactgtgccatgatctctggccctgacaccactgcagtctcctgcatgcccctcactgtctttacgggtacagagaaaacacaaagcgggggcaactgcggtgaagtggagtcgtctaccttggctgaatgtgccacagacatcctgttaggaaaggagtttgcaaatataacacgaggggaaaactcccagtgaatacaggggaaagcctggtaactccacggcgcttaagcttctaagcgtcaatggtggtttaatttccatggaaaatgttaagctccgttacagtggtgacctatgatgtccctcagaaaagaggcaatgagccaggctggggacacctgtaatcccagcactttggaaggctgaggtgggaggattgtttgaggccaagagttccagaccagcctgggcaacacggcgagaccctgtctgtacaaaaaaaaaaaaaaaaaattagctgggcatggtggcacgcacctgtggtcctagctacttgggaggctgaggcaggaggatcaactgcttgagcccgggaggttgaggctgcagtgagctgtgattgtgccactgcactccagcctgggcgacagagcaaggccctgtctctaaaatttaaattaaatgactccatatgcagattgcagaagctccatcagtccaagagtgagtgcaaaggatctatgagaaagtaacaccaaaccctcccatgacgagaccttggtttgaggtttgaaagctctgtctctgctgtgtcacctctgagtcccctcctctagcacagtgtgtggccacagtgaggtcaggaggaggtgctgagacggcccgctcgatccatctttgctgttccccgtgcccctgcccatgttgggagacacgggcctcggccttcctgccgggagccacccggaaccttcccacgggaatgtgttccttgcctgggtcgcctcaacttgctggggaacgcctcgtgtcaaagccaaacacgcccaggccctggcagtgctgtcagggcggtgcctcctcccctggctggggaaaggctgctaatgctggtcgggtttgaccagcctggctgtctgtctggatccccccaagtctggatttcagggtctttttccaagcttgcagtttggcagcccgtttaggagggctaggggcttcacctgctggatgccacctaggcacacctggccccaaacaccttaaccatttcccagccttctctccaagccaccactcacgagaccacagactggaggcaatggaggcggctcttctctcaagcgagggatttgcattttgcaaggcatgaagctctcataaaatttcagctgtgcccagcaccagaactcctgcctttcccacatgctcgtgttcagcctctaccactgaaccacactgtgactcactttttttttttttttgagacagggagttcagcacccaggctggagtgcagtggtgtaatctcggctcactgcaacctcaaactcctgggctcaagtgattctcctgcctcagcctcccaagtagctgggactgcagccatgcatccccatgcctggctaattttttcttttcttgagagagtcttgctctcttgcccaggctggagtgcagtggcgcgatcttggctcactgcaacctcagtctcccaggttcaagtgattcttctgcctcagcctccggagtagctgggattagaggcacacgccaccatgcccagctaatttttgtattttggtagagatggggcttcaccatgttggccaggctggtcctgctctcctgcctcggtctcccaaagtcctgagattacaggtgggagccactgtgcctggccatgaatttttttttttttttttaacatctcaacacagggacagccaaagaaacagaggctgacatttgaaaagcaaattggactctgcgttccaggacgcggcggctggggcatgacctgggtgccagcctggcctcctcccctcccacctgcctcacctctagcaggcgcacgaactcctccagagtcttcactgccacacccagtgtgtggacagagaactgcctacctccctgggcgtgactgtgatgccctcagcccaggctcaggtgtgccaacggctagggaggtcgctctttccctggggggcagggctgaagcaaggctgccatctgcccagacaggagaatgaacgccaacggctggcaccggctctggagccagaggaggccacatccgggcagccggtggggcgggcagatccctgaaggaggcaaagcccttacacgttctggcagaaaaacaaaatgacttatgtatgtttggaaaagaatcatatcaggacccccagaggaccctaaggagatgggcaaaggctcttttgcagcttgggagtgaagccccctccccaggcccaggtataaagccatccccaggcccagcttctctccatctgtgtctacccgcctcaatacatcccctgggaccccacggccagggtcaggcactgaagcagaagctgccaggggctggcactcctggggactccagttcaatgtggggggcccggctgagaaagcagctgtgtgtcaccatccctagatatgtcgacaaccaccaaaaggcaggtctacactttctggaaaaccaccgactccacacccagtagagctgcaactcggactcctatagtcgttggctgtgtaaatggtaagccctgagccccagctccccctctgccactgcaccgagtgaggagggggcttgtggaggttgggtgcctgccctgggcaggtatgtctgtcactcagggcagctctcacctgctcaggtggggcttcgaagtcagaggcgtccagggcatcctgtatctggctgtccagcaggaagtcgagttccacagctaaagagtctgcccaggtgccctggtctgcagaatgaggcaggtggtctcgctgccctgccagctctgaggtggtgtctggaatgccctgctgagccccgggctcctggagagggtcgtctgctatttctctgtgttccagcacaacagaggcttgcggggacacacggaacccctcgaggtctcgttcgaggttctggccacctaactcggcttcctcttgagcaggacctggctcctgcttctgattgacacatggacctgtgtccggggatgcatgaccggaatctccagcacccatcatggactctccgctcccaggtgccagagccagggaggctgtagggcccactaggacatcgccggggggcttgccatcctgccctgcctccccactttctcctgtggtttccccagtgagcgaggtgcagcctggcaaggccctcctgtggcctccatcagcggccttcctcctgggagaggcaggtgatatggcactggcctgcccatcgggcccagccacctccagagccctctcttccagctcagtggggtctgtgctcaggtctgcgatgacaaccatcccgagggaggagcatcccaggctgctatgagtcccttccccttccctacccatcctgctgggggtctgctgggggtcaggggagccctgggccacagacccgggttccaggcaccaagaggcagggcccagtcctggagcagggcctgaggtaggagctgatgctggggtacaggggacaccgtctccctcctcctggggccctccaggcaggccagcccctgctgtcctttgggcccctccctcctggggggctcctctgtctggcttctccccttcagaatcaatgcttggtaggtgttccttttggccaccgtcacctggaaccctgtctgtctcaggcttgctgtcatcggccccttgttctgacaggtggtcttggctggccctctgtgaggcggacaaccccgtccccctgtctggagggtcatcaggctgagaatccccactgccgggcaccgcctgcacagggctctggctgctctgctcagggcgggcactgtctgcctgcgttgggtcccccagctccgtggcctcctggagggggacccccagggtctccactagcagctggcatcctggactctgggcgctggactctgcgattgtttcctgtggacagaaaaagactcagccccggggcctttgataaccaagttctccgaagagttttctattaggttggtgtaaaagtaattgcgggttttgtcattacttttaatggcaaaaattggccaggcgtgatggctcatgcctgtaatcccagcactttgggaggccgaggtgggcggatcacttgaggtcaggagttcaagatcagcctggccaaaatggtgaaaccccatctctactcaacaaatacaaaaattagccaggcatggtggcagttgactgtagtcccaactactcaggaggctgaggcaggagaattgtttgaacccgggaggcggaggttgcagtgagccgagataggactgcactccagcctggacgacagagtaagactctgtctcatacacacaaaaaaattagtggcaaaaactgcacttacttttgcaccaatctaatagttgtcaccaccctgttcaaagactcagatattggcaccggccatcatgcatggaaataggcatcagtaccagggccggcgactggagggggatctggaagcacagaaacctctccttccaccaagctcttctctccaccagcaccaggtactcaatcagatcagggatatgaaaatcaaggtggcattcagaccacaccaatgtcaatttcctgtttattattattattattattattattattattagacagagtttcactcttgttgcccaggctggagtgcaatggtgcgatcttggctcactgcaacccccacctcccgggttcacgcaattctcctgcctcagcctcccgagtagctgggattacaggctcgcgccaccatgcccggctaattttgtatacttagtagagacagagtttctccatgttgaccaggctggtctcaaactacagacctcaggtgatctgcccatctcggcctcccaaagtgctgggattaaaggcatgagccactgcgcccagcggctattattatttttattatttatttttcataattttgagacagggtctcactctttcgtccaggctggagtgcagtggtgtgatcacggctcactgtagttttgaccttcctagattcagacgaccctcccacctcagcctcctaagtagctgggactacaggtacacaccacaactggctaaattttgtggtttttttggtagagatggcgttgtgccatgttgcccaggctggtcttgaatgcctgggctcaagtgatcctcctgcctcggcctcccaaagtgctgggattacaggtgggagccactgcacctggccaagttttaaaacaattattgtagcctggacgcagtggctcatgcctgtaatcccagcactttgagaggccgaggcaggcggatcatttgaagttgggagttcgagaccagcctggccaacagggtgaaacccctattctaataaaaatacaaaaataagccaggtgtggtggtgtgcacctgtagtcccagctactggggaggctgaggcaggaaaatcacttgaacccaggaggtggaggctgcagtgagccgagatcacaccactgcactccaacctgggcgataagcaagactccatctcaaaaaaaaaaaaaaattattgtagagacagagtcttgccatgttgcccaggctggtcaagggaagtctcccaaagtgttgggatcataggcatgagccactgcacctggccaattgcctagttttggtgatggactatagttatgcatggtgttaccactcggtgaagctaaaacagagaacaccggaaattcactctgtaccattttgtgtttttttaaaaattgtgctaaggccgtgcgcagtggctcatgcctgtaatcccagcactttgggtggctgaggcgggcagatcacctgaggtcaggagttcaagaccaggctggccaacatggtaaaaccccgtctctactaaaaatacaaaaattagctgggcgcggtgggcaggcgtctgttatcccagctacttgggaggctgaggcgggagaattgcttgaacccagtggggcagaggttgcagtgtgccaagatggcaccatcgcactccagcctgggtgacaagagtgaaactctgtctcaaaaaaaagaaaaaaaataaaataaagaattgttgcatagtcaacacacatccatagcgcaatgtactgaaaacggtgggtggagaggtgcaggcctcaccattgccaaagaactccagggttaaatggggctgccgaggctgggccaggaggctgcacctgcgctgggctcagcctggctgattttagagccttaccaggctaaaggccccactcccacggtcctcatccttcatctcttcttttcttgtcactgtcttcctggattttgcaaactggggaacaaacctcccgaatgagttctgtaaaccggatacaagaacaaagcagcaataaagataagagaggaatgaggtcttaggaaaaaagcaaccccaaacctgctcctttcttgtagccttgagagaactccacccttgccctctgggcacattccctccagcccctgtagaccatgagtgagcaattggtgacaaagaagggagacacagagccggaactttaagggaggcagtggtgcttctatatccacgaggccacaggacgagctcacctgggaaggaggaaggggagctggctccttttctggttgacggaggagccggcagggagatcctgtttcctcatcaggggagctatgtaggaaaagataaaactgaaggagatctgcccgggtgcggtggctcacacctgtaattgcagcactttgggcggctgaggcgggcagatcaccgaggccaggagttcgagaccaacctggggaacatggtgaaaccgtatctctactaaaaatacaaaaattagctggatgtggtggcgcacgcctgtaatcccagctacttgggaggctgaggcagaatggcttgaactcaggagatggtgtttgcagtgagccaagattgtgctactgcattccagcctaggtgagagaacaaggttctgtgtcaaaaacaaacaaacgagggggatctgaaatcctcctaggttgtcactcacctatcgagacaaacgcaaaacaaaatccaacaggaaaccagtgctaagagtctcctaggctgggcgtggtggctcatccctttaatcccagcactgtgggaagctgaggtgggtggatgcccaggagtttgagaccagcctgagcaacatagtgagaccccttttctacaaaaaatttaaaaattagctggacgtggtgatgtgtgcctgtggccccagctacttgagaggctgaaatgtcacgatcatctgagccaggggagttcaggctgcaatgagctatgatcacgccactgcactccagcctgggtgacagagcaagaccctatctcaaaaaaaaaaaaatgtctgctagatggaaggccctggaaaacctgctttgaaagagtgggatggggatggagaagcagtgacctgagaacatttaactgtcaaggagggtgcagagtcccacctggagaatacactgccttaacaggtgactttgttacatttataatcccaggaattgccttctgaactgggaatagggatattctcatttggacggacactccagccctgacacggcacattctagggaaaggaaattgtggatgcaagaaacatagtgtctttaaaaactagtgaaacttagggttatatttaaataaataagggccaggcgtggtggctcacgcctgtaatcccagcactttgggaggccgaggcgggcggatcaccttaagtcaggagttcgagaccagcctggccaacatggtgaaaccccgtctctactaaaaatacaaaaattagttgggtgtggtggcgggcgcctttcatcccagctactcaggaggctgaggcaggagaatcgcttgaacccgggaggtggaggttgcagtgagccgagattgtgccactgcactccagcctgggtgacagagaaagaccctgtctcaaataaataaataaataaataaggatatgtatatcgttttgttttggctaattattttatttcttgtagatatggggtcatccttgttatgttacacaggctcctcttgaactcctgggctcaagcgatcctcttgcctcagcctcccagtgtgctgggattataggcatgagccactgcactcagccctgattgcttttctttttttattggtcgttagctcacataacaacaattcctttgttcccttcttgattaaggaagaggaggaatgtggaagaaggatgggtttgaccagcagacagaatatgagttctgtaaccctgaaaaatgcaatgttatctttgcccacagttaaaacttttttttctttttttagatggagtctcgctgttgcccaggctggagcgtagtggcatgatctcagcttactgcaacctctgcctcctgggttcagtcgattctcctgccttagcctcctgagtatctgggattacaggtgcgccaccacacccagctaatttttgtatttttagtagagacggggttttgcagtgttggccagtcttgtctcaaactcgtgacctcaagtgatcttcccccctcggcctcccaaagtgttgggattacaggcattagccaccatgcccggctaaaacatcaacccttcttaccagcgaggaaagctaggagaagcgagatccgagggccctgagctctgggagggagtgggtcacagcactagataggttgtgggtctctttcccaaagcattgctgtctgctgagctgctgtgctatgtggactgtcagtggggagacctgccggaatgttcagagccacctacctggagacggcctttcctggttcctccccgtgctgctgtgtagagggaacaggtcccaatttgccctctggctcctcagggtgatgtaaacagcccaacatggaactctgggggtccccatagaagtctcctagccttgggttctttaggggttttggaggacagagtccctctcctgttttagagacagaggaagatgaaggggtgggggatacagccactgctcatggctgacaactcaggtctcccccactacaaccaggctgcacgcgagaaggggccgaatccatttcactctctgcggggtcccaagtgcctgtaagagcatcttgtacactgttggtgctcaataaataaattatccatgactggataaatgcacaccaccaagggcagacaagactaaattatgtaccattctaatgtgctgagacatctgcaaaatagccatcctgggaaaactgggactcacagccaccgggtgctgaagaggtgatgctttggccacgtcctggccccttgcatttctgcactaacttccccatcactgaaagcaattgcgatgtgtcttcttctggcatttaagaggctaaagatgcttattgacatctttgtatatatagcgcagtggctcacgcctataatcccagcactttgggaggccgaggcgggtggatcacctaaggtcaggagttcaagaccagcctggccaacatggcaaaaccccgtctctactgaaaatacaaaaattagccgggcatggtggcacccacctatagtcccagctacttgggaggctgaggcaggagaatcgcttgaacctggtaggcggaagttgcagtgagctgagattgcgctactgcactccagcctggttgacagagcgagactctgtctcaaaaaaaaattaatatatattatatatcatatataaaatacatacatattcatatttaatatatacatacatataaaatatataattataatgtatttacatattgcatatttataattataaaatatattatttaaattatatatttatgatatattaatatattataaacattatatccttgtattatattatatatttatatatgatatatatttattaaatatatactatatatattatatatcccattatattgccaggttgttccatgtgatctaaagccaggccacgccacctcaggattcagcctcagccaaatatgtaaatatatatatttatacatatgtatttatacatacatatgtatttatacatacgtatttacatatatgtatttatgtattatatatactatatatatattttttctttttttaagacagggtctggctttgtctcccaggctagagtgaggtggtgcaactgtggatcactgcagtcttgacctcataggctcaagccatcctcccacctcaggccactcaagtagctgggacaaaaggtgtgtgccaccatgcctggctaagttttcttttgcttttgttttgttgagacagggtctcatatgttgcccaggctggtcgtgaactctggcgctcaagtgatcctcttgtctcggcctcccaaagtgctggaattacaggcatgaaccactttgcctcgccagaatctatcttttgaattaagaaaactcccttacatcgaaactttttttttttttttttgagacagagtctcgctctgtcaccaggctggagtgcaatggcacgatctctgctcaccgcaacctctgcctcccgggttcaagtgattctcctgcctcagcctcctgagtagctgagaccacaggcacgcaccaccacacccagctaatttttgtatttttagtagagacagggtttcaccatgttggccaggatggtctcgatctcttgacctcatgatccgcccgcctcggcctcccaaagtgctgggattacagacatgagccaccgtgcccagccacatcaaaactttcaatagtggctggcttgtaagacttccccaagcctggccccaacctaatcatgcattcagtgaacaaatgataagggttgactctagtgagttccacaccagatgctgtcctaagaacttgtgtgtgttaagataaaagctcaaggcagggtgctgctgttatgcctgccttacagaagtaccttgagcaattcaatattatctttgtccatgattaaaatattggcctttgccaccagcaaggaaagatgccagcctgtaatcccaggactttgggaggccgaggcaggtggattgcttaagctcagcagttcaagaccagcctgggcaacatggcgaaaccctgtctaaaaagtacgaaaattagccaaacatggtggtgcatgcctgcagtcccacatacttgggaggctgaagggggaggatgacttgagcccagaggaagagattgcaatgagtccagactgtgccactgcactccagcctgggcaacagaactagagcctgtctcaaaaaaacatttaaattaaacatttaaattaaaataaataaataaaagggcaatatggcaaaaccccatctctactaaaaatgcaaaagttagctgggcatggtggtgggcacctgtaatcccagctacttgggaggctgaggcaggagaatcgcttgaatccggggggctgaggttgcaatgagccaagatggcgccactgcactccagcctgggcaagggagtgagattccatctcaaaaaaataaataattaaattaaattaaaaggaaaggaaagatgcgagaattgacacccaagggccccaagttcccagagaggtgaaaacgttaaggcacacagaggcccaggaaccaaggctggcaccccgtccaactccagaaccagcacacttaagaatacttgagcatttactgaatgcctactatgtagtagatttctgccaaggcaggcagaacaaaaagacaaaccaacagccaggtgtggtggtgcacacctgcagtcccagctactcaggaggctgagggggtaggatcacttgagtccaggatctcacttgggtaacacagtgagatcccacctctataaaacatttaaaaattagctgagggtggtggcatgcacctgtagtctcagctactcaggaggctgaggcaggaggattgcttgagccctggaggttgaagctgcagcaagccgtgattgtgccactgcactctggcctcagcaacagagctagatcctatctctaaaaaaaacactaaagaataacactatccaggaccaggcgcagtggttcatgcctgtaatcccagcactttgggaggctgaggcgggcggatcccctgaggtcgggagtttaagaccagcctgaccaacatggagaaaccctgtctctactaaaaatacaaaattagccgggcatggtggctcatgcctgtaatctcagctactcaggaggctgaggcaggagaatcgcttgaacccgggaggcggaggttgcagtgagccgatatcgcgtcattgcactccagcctgggcaacaagagtgaaactccatctcaaaaaaaaaaaaaaaaaaaaaagaataacactatccaaaccccagatggactctttccaacctcagctctacattacacacttacacatcgtgaagtaaacctactgaatgagtctctctttcctcgacgccaattgctagggtctgcatcagtccccattcagctgtttgccctccactaaaccacagcaatcttcctgtaattgcttctaattcttcttcttcttctttttttttttttttgagatggactctcgctctgttgcccaggctagagtacagtggcatgatctcagctcactgtaacctctgcctcctgggttcaagcaattctcctgcctcagcctcctgattggctgcgactacaggtgcaagccaccatgcctggttaatttttttgtattttcagtagagacgggttttcaccacgttggccacactggttttgaactcctgatctcaagtgatctgtctgccttggcctcccaaagtgctgggaatgcaggtgtgagccatggcgcacggtaagttgcttgtaattctgtcagttacagttcgggagtgcccgtttagaactttatcccactgctgtgtatttgcttagctctcgctgagagaagcattttcctttgtcctctgactacagctggaggatctccagggcaggaactgagtgcaatgcaccctttgatctccccttcgccctgccctgccccatcaggtgcccacctcaaaggatgtaccaccacaagtaaagctccgatggacattgcttatagaaacacattcctaaccgtccgggtgcagtggctcatgcctgtaatctcaccacgttgagagggtgaggtgggcagattgcttgaggtcaggagttcaagaccagcctggccaacatggtgaaaccctgtctctactacaaatacaaaaaattagccaggtgtggtggtgggcacctgtagtcccagctaatcaggaggctgaggcaggagaatcacttgaacccaggcggcggaggttgcagtaagccaagactgcaccactgcactccagcctgggtgacagagcaagactctgtctcaaaagaaacacgaccttgtggtctgccagaaaagacaaaatatagctgctttgtttatttggtttcttgagattctcaaacacttgctcacttggctgactgaatggccatttgtaccaaataaaaagcaaaaaaatatcaatggcattgaagagtcttctctttccttcctgtgatctgtccacatgggactaatttaagaaaaaataaggcagaaccttgtgttcgacaccaaagactaaagacattgggagggaaaaggcctctttcaccacctgccagaattttcttcctctctctccacccttccagcacacacagaaagggttgtccagggccagcccagaggtccactgagctggggagtctaccgccaacagaggccccaagtgacctgctgtgggtggacctggctgtccccagcttccccctccaaggtcagagaaattctgatgcctccaagcagcctgttgctcatctctgcacaaaacatgttcaatctgctgatcatttcctctcctgtcccatatcttgggggaaaaaacatgcacaccattccctaaattcatcagccactaaattaaaaagtcatttcaaaattttgaagaaatttaacttactttagaaaatgataggcaaatggaactctactacatcatattgggagtttgtctttctgacttggtttgttcctttttttttttagacagagtctcactctgtcgcccaggctggagtgcagtggtgcaatctcagctctcctgggctcaagcgagtctcgtgtctcagcctcccaagtagctgggattacagacacatgccaccatgcccggctaatttttgtgtttttagtacagatggggtttcaccatgttgaccaggttggtctcgaaccctgacctcaaatgatccatccacctgcctcggcctcccaaagtgctcagattacaggcatgagccatcgtgcccaacaatctttctttttttctaagagacagggttttgttctgtggcccaggctggagtgcaggcgcaatcatagctcactgcagcctggaactcctcagctcaagccatcctcctgcctcaatctcccaagtagccaggactacaggtaggcaccaccacactggttaattaaaatttttttttttttttagagactgggtaacattatgttgctcaggctggtcatgaactcctggtctcaggcaatcctttcacctcggcctcccaagtagcctggagtacaggtgcgtaccaccaagcctggctattttggggtgtttttcttttcaaatgatgaaattgtataggtatgttgacaagtaaacatggtcatgatctaccacaaagtgaaaaatggaggttgcagatcagtaagtgtgatgattcgattttccaataaaaacattttatctgggccaggcacggtggctcatgcctgtaatctttgggaggctgaggcaggcggataacttgaagtcaggagttagagagcagcctagccaacatggtgaaaccccgtctctactaaaaatgcaaaaatttgccaggcatggtggcaggtacctgtaatcccagctactcaggaggctgaggcatgagcatcacttgaacccaggaggcagaggttacagtgaaccaaaatcgtgccactgcactccagcctgggtgacagagtgagactgtctccaaaaaaaaaaaaaagaaaaaagctcaacactgtatctgtatatatacagaaaaagtctgaccaggcatggtggctcatgcctgtaattctgagcacattgggaggccaaggcaggtggactgctggagcccagaagttcaagaccagcctgggcaacatagtgaggcctcgtctcttccaaaaaatacaaaaattagccagtcatggtggcacacacctgtagtcccagctattccggaggctgaggtgggaagatcacctgagcctggggaggtcgaggctgcagcgagctatgattgtgccactgctctccagcctgggcgacaaagcaagactctgtctcgaaaaaaagaaaaaaaaaaaagctgggtatggtggctcactccagtaatcccagcactttggctgaggcgggcagatcatgtgaggccaggagttcaagatcagcctgggcaacatggtgaaaccccatctctactacaaatacaaaaattatctgagcgtggtggcagacacctgtaatcccagctactcaggaggctgatgcaagagaatcgcttgaaaccaggaggcggaggctgcagtgagtcaagatcgtgccactgcactccagtctgggcaacagagtgagacatcatcttaaaaaaaagtctgagctgggcgcgctggctcatgcctgtaatcccagcactttgggaggccgagatgggcggatcacctgaggttgggagttcgagaccagcctgaccaacatggagaaaccccatctctactaaaaatacaaaaaaattagctgggcatggtggcatatgcctgtaatctcagttacttgggaggctgaggcaggagaattgcttgaatctaggaggcagaggttgcggtgagccgagatcgcgccagcctgggcaacaagatcaagactctgtctcaaaaacaaaaacaaaaaagtctgggctgggcgcggtggcctactcctgtatccccagcactttgggacaccaagacgggcagatcacctgaggttgggagttcaagaccagcctgaccaaaccctgactctactaaaaaaatacaaaaattagctcagcatggtggtgggtgcctgtaatcccagctacttgggaggctgaggcaggagaatcgcctgaacttgggaggtggaggttgcagtaagccgagatcgcgccactgcactccagcctgggcaacaagagcgaaactccgtctcaaaaaaaaaaaaaaaagtctagaagcagtgtaccgaggttagagtcctgtcctgtttttcatgctgttctacagttgatcactgtcctatggctatgctagatgtcaacattagggaaagcttggagaagggtagctagaactctctgaattatttttgcaacttttctttaagtcccagattacttcaaaataaaagttttcttaaaagtctggaagaagaattgttaacagcagtgtacatttgtgtactaccttaggtcagttctgggtgctttacagatactaatccacatgtgagctctaagggcaggattcttcaccttggaggacatttggggctggatcattctctgtggctggggggcatcctatgcatggtaggatatttgagcagcatccctggcctccacccactagatgtcagtataatttccccagttatgaaaaccaaaaaaagtctctaggccgggcacggtggctcccacctgtaatcccagcactttgggaggctgaggcaggcagatcacctgaggtcaggagtttgagaccagcctggccaacattgtgaaaccctatccctactaaaaatacaaaaattaggcgggcgtggtggtgcacatctgtagtcccagctacttaggaggctgaggctgcagaatcgcttgaacccaggaggtggaggctgcagtgagccaagatcttgctactgcactccagcctggacgacagagtcagacttggtctccaaaaaaaaaaaaaataaagtctccaaacattgccagctgtctctggaggtcaaaatcccttcctctcacctagttgagaaacactgctctaaaggaaagggtagtggcttttattatccccaatttacaaaaggggaaactgtggcacagaggaaatcatccaccaccacacactgagcagaactgggatgaacccaggttttgggccccagagtaaaacactcagccacataccgagtggccttgtagtacatcaagcattattccaggggtcatctctgggactggttccgcagggaggctgtcccgctgccctgaagcccggggaggcctcctctaagctgtgggaccccaccagaggcttgcagaagctccagaaaactttcacttttacttttcctgtatgccctctccgttatttctatttttctttctttctttttttttttgagacagggcctcaatctatcagtcaggatggagtgcagtggtacgatctggattcactgcaacctccacctcccagttcaagcaatcttcctgcctcaacctcctgagtagctgggactacaggtgcctgccaccacgcccagctaatttccttactttacattgtagagacaggatctcgctatgttgcccaggctggtcttgaactcctggactcaagcgatccgcccacctcggcctcccaaagtgctaggattacaggcgtgagccaccacaccggccttctatttttcttaccagcatgaattaaatcctttttgtctttttcttttttttgagacagagtcttgctctgttgcccaggctagagtgcagtggcaccatcttggctcactgcaacatcggactcccaggttcaaacgattctcctgcctcagtctcccgagtaggtgggactacaggcatgtgccacaacacctggctaatttttgtatttttagtagagacggggtttcaccatgttggtcaggctggtcttgaactcctgaccttgtgatctgcccgcctcggcctcccaaagtgctgagattacaggtgtgagccaccgcacccggccaatccttgcttccttttaaggaggttaaggcagtcgtgttagccagatctgcaataaacaagcccacattcttcccacaagcagaagcagaaatcaacaagtgtccatttgaatgaacgtacctgaggtccgcagcttcttcctcttagtcattttatcttccccttgagaaatctgaaaacaagcaaaatctctcatcattataagcagtctctgtctctgtttatatccagtggctttggctgagagcagaggttacccctacctccacctcagcccatttggctgccccaggggtcagatggctcccactgggacacaggatgggacacagagtcacagccactttgggccatggccaggtaggaattcaaacctcctccaaactgaagatcttatgcccaggacctgaaagacaaatgggccctggggggtccttatagatagccccggggacccagactctggtccctaggatgaaacagcctgtgtgaagcccctccctccagactggggtatctgggggcccttccaaggacacttgaggactctccaggggcctctggagaccagcctggccaatatggtgaaaccccctctctattaaaaacacaaaaattagcctgggcatcgtgacgcacacctgtaatcccagctacttgggaggctgagacagtagaattccttgaacccatgaggcagaggttgcagtgagccgagatcgctctactgcactccagcctgggcgacagagcgagactccgtctcaaaaaaaaaaaaaaaaattagtcaggtgcggtggcacacacccgtaatcccagctactcaggaggctgtggtacaaggccaggaggcagaggttgcaatgagccaagatcgtgccactttaaaggggacagctgggtccttggaggggaaagagctgccataggccggtttctcccagccttgggggcgaggcaaaccagaacggacctgggccacagaagtcgttgaggaccctctgtccttatcagaaacgagctctgcctggatcagttgggaataagtcgcttgaattatccgcgttactctttttggaaaaaataaatggccaaattggccctcacagaacgctggaggcctcgagtccggaggtgaaagatggaaaggcctgagggtgggcgctgtagaccccgctcccggtgacaagccccacactgacactacgccgaccaccgagaagtgaggactccacaggccgagagcccacgtgaagccggagcccgtcggtgactgacagacgctctgaaccccacagatgtcgccgcccctcacacctgcgcgcgctctgcctctttcccgcgccccgcgaggtcccgccccgcgcatgagcgacgcaaacaccgccctcgcagcccgcgacagtcagcaccgccccagccaggcgcctgcgcgcccacgcactacctgccgggagttgtagtttcggctcggcagacccggcgagcccagtggccgcgctccggtgcggcggcgcccgaggcccgaggcggaagtgggacggccaagcagggaagcgagggctcgggatcgacggccgcggggcgccgacgaggagtgcaggactcaggaagggcgagtgcgcggcgacagagcccggggaaggaggcagggcaaggccgggcttgggggcaggtggtccgggcatccagccttgaagatgcacaagaggaaaggacccccgggacccccgggcagaggcgccgcggccgcccgccaggtgagtttgcgccccacggcccgacctggggatccctccccacccccgtcactcgctcagggaagggccccaccccccagggaagcccgatctccgccccacaggtaagccccggtccccgcctccccccaggtgaggctccaacaccacccaagtgtggcctactggccttggctccccagctcctggggccctgccccgggttcggggccacctgttgccacagctgctccagtcgaggaggggcagtcctcggacttgacacatcaaacccttgcatcagtcgggccatgtcagactctttttattccattgtacagatgaggactttgagactcagagacgtgaagacatctgcccaaggtcatagggattaacagcttggccagggctaagcacaaatccagggctgcagccataagcttatggcactgtggctggaccccttctcactctcccgacttctttgccccaggcaccagatagtttgatttttctcagttttgatggaaggagcccaggacatagcttggtgttcagatattagagtctggctgacctgaagttccctcctggcctctgtacatcggacacttgactttacagctctgagcctcagctttctcatctgtaaaatggagatctctataatcccagcacttcaggagatggaggcggaggcagaggtgggagagtcatttgaggccagagtttgagaccagcctgggcaaaagcaagacccccgtctcgacaaaaaaagactaactgggcatggtggcatgtgcctgtagtactactacttgggaggctaagaagggaggattgcttgagcccaggagttcaagaccgcagtgagctatgattgcgctacttctgctccagcctgggtgacagaacaagactctttctctaaaataaagataaaaaattaaaaatggaagtccggggtggtgtctcacacctgtaatcccagcactttgggaggccatggcgaaaccccatctctactaaaaatacaaaaattagctgggcatggtggcgggcacctgtaatcccagctactcgggaggctgaggtgggagaatcgcttgaaccgagaggcggaggttgcagtgagctgagatcgcgccactgcattccagactgggtgacagagcaaggctccttctcaaaataaataaataaattccttctgaaaataaataaataaataaaaaattaaaaatggagacctccaagagaccctacattacaggacagttgtagagagtcattgagatagtttatggaaagtgctagaacatagcactcaataaatgttactattatcattattactagttggtggaaccatacataattgccaatatttggccattttttacctacaggaaaggcaatttcatatggttaaacacgatgttatcacatcatgattggtcattagccaagataggaagacgggtctgcatggcaaacctgcattgtggttaggggttctttttttgtttgtttgtttttgagacagagtcttgctctctcgccccaggctggagtgcagtggcgcaatctcggcccactgcaacctccgcttcccgggttcaagcgattctcctgcctcagcctcccgagtagctgggattacaggcatgcgccaccatgcctggttaattttgtattttttagtagagacggggtttctccctgttggtcaggctggtctgtctcgaactccccatctcaggtgacccgcctgcctcggcctcccaaagtgctggggttacaggcgtgagccaccgtgcccggcctaatttttgtatttttagtagtgatgggatttcaccatgttggccaggctagtctcgaactgctgacctcaggtgatccccccaccttggtctcccaaagtgctgggattacaagcgtgagccactgcacctggccctgtcgtcagggcttctaattgctcttcttttttttttggagacagagtcttgctctgttgcccaggctggagtttggtggcgcaatctcagctcactgcaacctccacctcccaggttcaagcaattctcctgcctcagcctcccgagtagctgggattgcagacaccgccagcactcccagctaatttttgtatttttagtagagacggggtttcaccatgttggctaggctggtctcgaactcctggattacaggcgtgagccaccgcatgcagccatcatgctcttgaagcccaaccttcccacacagcccctctgctgaggatgctggaaagaaaagcccaagtgtacagagtagctttgctttgggcaaagtgtggagcctgcttccttccctccttccctccctccctcgcttccttctttttttccttccttccctccttcctccctccctctctccctccccggctccatctctctttctttctttcctttcaacagggctttactctgttgcccaggcggagtgccgtagcacagtcatggctcactgcagccttgatctccccaggctcaagtgatcctcctgcctcagcctcccgagtagctgggaccacaggcacacagcacaactcccagctaattttaaaaagttttttttcctgtaatcccagcactttgggaggccgaggcgggcagatcatgaggtcaggagatcgagaccatcctggctaacaaggtgaaaccccgtctctgctaaaaatacaaaaaaaaaattagccgggcgtggtggcgggcgcctgtagtcccagctactcgggatgttgaggcaggagaatggcatgaaccccggaggcggaggttgcagtgagctgagactgcaccactgcactccagcctgggtgacagagcgagactctgtgtcaaaaaaaaacaaaaaacaaaaaactttttttttttttgtagagttgggggtctcactgtattgcccaggctggtctggaactcccagacacaagccatcctcttgccttggcctcccaaagtgctgggatgacaggcgtgagccactgcgcccagccaggggcctgcttttcccactgaacttggcccagcagcacatcataagtgtggattcagatcagagagctgggtctcttgccctttgccccaggttgaactgtgccagagggcctggcctatcttggaacacctgttctgggcttgttccagcctcctggcactccccagggaaatggctttccctgggagaccttgtttccttcctcccaaggggactctctggccatcatggctgcctctagccatgtggtgaaccaaaggtctgactgaacccttgctgttcccctagctgggcctgctggttgacctctccccagatggcctgatgatccctgaggacggggctaacgatgaagaactggaggctgagttcttggctttggtcgggggccagcccccagccctggagaagctcaaaggcaaaggtgagatggttaacacaccctcagaacattttctgatctcctgcaagtggttcgggcgcagaactgggggcactgggtaggtaggggaaagaagacagagaagacccctgttctcctggagccaatgatctgggtaagagagtcaagatcgactctgaggccgggcacggtggctcacgcctgtaatcccagcactttgggaggccgaggcaggcagatcatgaggtcaggagattgagaccatcccggctaacacggtgaaactctgtctctactaaaaatacaaaaaaaaaaaaaaaattagccgggcgtggtggcgggcgcctgtagtcccagctactcaggaggctgaggcagaagaatggcgtgaaccagggaggcggagcttgcagtgagccgagatcgcaccactgcgctacagcctgggcgacagagcaagactccgtctcaaaaaaaaaaaaaaaaaaaaaaagatcaagtctggaccgagactgagagttggaatccgagctctgccacttactggttatgtgacttgatgagtcacatcatgtgctttggcctcagtttcaccatctgtaaaactggaataataaccatgttataggagttaatctggagtccataagtatttcacccagggccccctcacacacaataagctcatgtcagccaggcacattggctcatgcatgtaatcccagcactctgggaggccaaggtggacagatcacttggggccaggagttcgagaccagcctggccaacatggtgaaaccctgtctttactaaaaatacaaaaattagccaagcttggtggcgaacacctgtaatcccagctacttgggaggctgaggcatgagaatcgcttgaatccaggaggcagcagttgcagtgggcagagattgcgccactgcactccagcctgggtgacagagcaagatcctgtttccaaaaaacaaaaaagagagaagcttcattcaggcatgaactactgtgctgttggctgtgaattcaaagttaatgaatgaacgatatctattcaggaaggtgtcttcaaacagaaacacacatagagcaaggttgtgtattgatcagttgattaaaattttgtgaccagagctgggtgtggtggtgcatgcctgtaatcccagctactcgggaggctgaggcaggaagatcacttgaggccaagagtttgaggctgcagtgagctctgattgggccactgcactccagcctgggtgacagagcaagatcctgtctccaaaaaaggttatgactggagattcacaggaacctaagcttaaatttcccctaggagcaacagtcttatagtcattaatttagtcttcaaagcagctttatagaatgtaacataactaataacaagatattggcaatatgctattctaagagcttcattgaccttctctgctccaacctacctatgaaggaggaactgttgtcatccccgtgtcacagagggagaaactgaggctcagagaggtgacatcacttgccgaagttctcacagagagaaagttgcagagctggggttttttttgttgttgttgtgtgtgtgtgtttttttttttttttttggagacaaacccttgctctgttgcccaggctgcagtgcagtggcgcaatctcagctcactgcgacctctgcctcctgggcttaagtgattctcctgcctcagcctctttagcagcggggattacacgccaccatgcccagctaatttttttttttttttttttttttttttgagacggagtctcgctctgtcgcccaggctggagtacagtggcgcgatcttggctcaccgcaagctccgcctcctaggttcacgccattcccctgcctcaggctcccgagtagctgggaccacaggcgcccgccagcatgcctggctaattttttgtatttgtagtagagacggggtttcaccgtgttagccaggatggtctcgatctcctgaccttgtgatccacccgcctcggcctcccaaagtgctggggttacaggcgtgagccactgcgcccagcctaatttttgtatttttagtagagacagggtttcaccatgttggccaggctggtcttgaacgcctgacttcaagtgatccttctgcctcggcctcccaaagtgctgggattataggcgtgagtcactgtgcccggtctgcagagctgggttttgaattcaggtagccaggccccagacctgaggctgaataaggaagagatgaaatggggaagtcagcgagaagtgggatcacctagcgtgtccaggatgggaaatgggggctcttggtgtacgaccctggtccacctggggcatccccctaccgccaggtcccttgccgatggaggccattgagaagatggccagcctgtgcatgagagacccggatgaggatgaggaggaggggacggatgaggacgacttggaggctgatgatgacctgctggtgagcactgagggcggggtgggggctctgatccggttgcccccatccagcaggcccttatatcctgccctggctgtgtgtccctgcaggcggagctaaatgaggtccttggagaggagcagaaggcttcagagaccccacctcctgtggcccaggtacagtttggatgactccactcccttgaaccacaacccaacggacagcccggggttcaagacctagccttttttatgagatggagtcttgctgtgtcacccaggctggagtgcagtggtgccatctcagctcactacaacctctgcctcccaggttcaagggatcctcccacctcagcctccccagtagctgggattacaggtgtgtgccaccacgcctggctaatttttgtattttttggtagagatggtgtttctctgtgttggccaggctggtcctgacctcaagtgatccacctgccttggcctcccaaagtgttgggattacaggcgtgagccaccgcgcctggcccacccttatccttcacagccatgtgacccatatcaggtgggtgacatgatgcttctgaaaccccattccctccactgggaaatggggaccatgatttctgcctcactggggcaggggaggctggtccagggatgacatggggccgactgttactgcagaaggggctaacaggggcatcccaagtggggtcaccacccacactgtgcccctgccctcccacagccgaagcctgaggcccctcatccggggctggagaccaccttgcaggagaggctggcgctctatcagacagcaattgaaagcgccagacaagctggagacagcgccaagatgcggcgctacgatcgggggcttaaagtaagtgggcagagggcagggtacagggaccccccgccaaccccgatgccctgcaccaagctcttggcttctcccaaaccaatactcacgccttatcttagacactggaaaacctgctcgcctccatccgtaagggcaatgccattgacgaagcggacatcccgccgccagtggccataggaaaaggcccggcgtccacgcctacctacagccctgcacccacccagccggcccctagaatcgcgtcagccccagagcccagggtcaccctggagggaccttctgccaccgccccagcctcatctccaggcttggctaagccccagatgcccccaggtaggtgatgggcagggccgggctgatatgggatccgagtgggccatctggcaggatgctgctctaggggggtgccggctgtgcactgattgtgagatattttcaacaccctgagtcctggggtcttcaagcccctggagttcatgaatacctcccaagcaggacatggatacccagagagttttttttgttgttattatgatattatgataaaatatagatcacatttgccattaaaaattattttagttcttttttttgagatggagtttcgttcttgttgcccaggctggagcgcagtggcacgatctcagctcattacaacctccacctcccaagttcaagcgattctcctgcctcagcctcccaagtagctgggattacaggcatatgccacacttggctaattttgtattttgagtagagatggggtttcaccttgttggccaggctggtcttgaattcctgacctcaggtgatccacccacttcggcctcccaatttgctgggattacaggcatgagccactgtgcccggctttttttaattctttgagacagggtcttactccatcacccaggctggagtgcagtgatgtgatcatagctcagtgtagcctcaacctcctgggctcaagggatcttccctcaccttcaccagtagctgggactacaggcatgcaccacacacttggctaattttttttttttttttgagtcggagtctcgctctgtcacccaggctggagtgcagtggtgcgatctcggctcactgcaacctttgcctcctgggttcaagcaattctcctgcctcagcctcctgagtagctggcattacaggtgcatgccaccacacctggctaattttttgtatttttagtagagacggggtttcactgtgttagccaggatggtctcgatctcctgaccttgtgatctgcctgcctcggcctcccaaagtgttaggattacaagcatgagccaccacgccaggcctcatcgccttttttttttttttgaaacagagtctcactctattgcccaggctggagtgcagtagcatgatcctagttcactgcaacctgcctcccaggctcaagcaatcctcccgcctcagcctcctgagtagctgggattacaggcatatgccaccgtgccccatgcccagctaatttttgtactttttgtagaggtgccatgttgcccaagctagaacatatcttctaagaggtttttcttcctaacctccccctaggaaaggaaggcctccctccctctctttgtgatatgaacacggggctttgccccaggtccaaacacttccctggcaggaagcaaagagacaactcaaaatactggcatgggtttgagaaagcaaacactgggtcactaaatccttctgcaaccaagctagtttccaagccattgtttttgacaaagttcaaggattactggaattgtcacctgaaattgtcaactgaaacgaccaaaaatttttcacaatggaagtttggcataaaacttgtcaggagttcaaagaatacaaagacatcacagtaacaaaattctgtgtcttccaatctatttgttaatgtgaagtaggtttctcaatactttaatttttttgagacggagtctcgctcttgtttccaggctggagtgcgatggcgtgatctcggctcactgcaacctccgcctcccaggttcaagtgattcacctgcctcagcttctcgagtagctgggattacaagcgcccaccaccaagcccggctaatttttgtatttttagtagagacggggtttcaccatgttgctgcccaggctggtctcgaactcctgacctcaggtgatccgcctgctccgcctcccaaagtgcggggattacaggcgtgagccaccacccctggcctcaacactttaaaaaagaaaaaaagtgcagatgtagtggctcatgcctgtaatcccagcactctgggaggccaggagttcaagagcagtctaggcaacatagcaagaacccatctctacataaaaattaagaaattagccgggtgtggtagtgcatgcctttagtcccagctcctcgagaagctgaggtgggaggttcgcttgagtccaggagttcaaggctgcagtgagccgtgatcgtgccactccaagtctgggcaacagagcaagatcttatctctaaaaaaagaaaaaacagaagaggattgaatgggagaaacgagttgattgttagggattggacccagctccaattatgtcagcaagaggtacatttctggtagaattttgctcttggtgtaccaaaactatcaaatagctcagcaggggctgggcgtggtggttcacacctgtaatcccagcactttgggacaccaaagcgggcggatcacttgaggccaggagttcaagaccagccctggccaacatggtgagacctcatctctactaaaaatacaaaaattagctgggcgtggtggtgcatgctggtagtcccagccactcgggtggatgaggcaagagaatcacttgaacccagaaggcaggggttgcagtgagccacgatcacaccactgcactccagtctgggcgacagagcaagactctgtctcaacaaacaaaccaacccaaaaagctcagctgggtgtggtggctcacacctataattccagcactctgggaggccaaggtgggaggatcgcttgaaccccggagttcgagatctgtctgggcaacatagggaaactgcgtctctataaaaaattaaaaattagccagccatggtggtgcatgcctgtagtcccagctacttgggaggctgaggtgggagaatcacttgagcctggaaggttgaggctgaagtgagctgtgattgcaccactgcactccagcctgggtgacagaatgagaccctgtctccaaaaaaataaaataaaataagcttgatgtatttacgttttgctcaattacatgctagtaataattataacaataattcaacccggaaaaacattgtttttaacaatgaaagatttataatcacaggaaataaaaccaatacaatgtcaaaggtgtgtcacttctacctccaaacatattttcagggaagtaagcctaagtttaaagcaatgggtccagttgttagtctgaaaaaaagatactgcgtgccattttctgggtgtttccagattttgcagacactgggtggtgtctttattgtactgtgttattttatactaagaattgcacttatagctttaaacattgaggtacttccccagaaaacatactgagcatattatttgaaactgtaactaacacactgtttaaaaagcactgaatactgggtttcctaactttgcaaacacactgcataaatatattttggttgtataaatatacaatagggtaggcaaaaaaggctttcaaacacacagctatatcatgttagcataaatttctgtgggggacgtggatggaaataagagaagactcaaaattcccaactgcttaaagtgagtcccaggatatatttaaaaagtgagttgggcatggtggcacatgcctgtaatctctgcactttgggaagctgaggtgggaggatcacttgagcccaggagtttgagactagcctggacaacatagtaagaccccatctctacaaaaaaaaataaaaaaccagccgggcatgcaggtgcatgctctgtagccccagctactcaggaagctgagatgggaggatcgcctaagcccggtgtctgaggctatagtgagcagcagagcaagactctatctctttaaaaaaaaatacattaaatatggccaggcacggtaactcacacctgtaatcctactttgggaggccaaggtgagcagatcacttgaggtcaggagtttgagaccagcctggccaacatggtgaaaccccgtctctactaagaatacaaaaattagccagaaattgggaggcggaggttgcagtgagccaagattgtgccactgcactccagtctgggcaacagagcaagacccagtctcaaaaaatacattaaagccaggcgcggtggttcacacctataatcccagcactttgggagtccaaggtgggcggatcacctgaggtcaggactttgagaccagcctggccaacacggcgaaaccctgtctctactaaaaacataaaaattagccgggcatgtgcctgtaatcccagctactcaggaggctgaggcaggagaatcacttgaacccaggaggcggaagttgcagtgagctgagattgcgccactgtaccccagcatgggcaacagagtgaggctctgtctgaaaaagaaaaaaaaaattaaataaataaataacaaatggtttacacggtgaacttggcccaggccctggaggcttcctgtatgttgttctcccttccaggtccctgcagccctggccctctggcccagttgcagagccgccagcgcgactacaagctggctgccctccacgccaagcagcagggagataccactgctgccgctagacacttccgcgtggctaaggtgcgtccagcctgacggacaggactggagggatggggcaggatgcttcccacgtggcctggtggcaaagcacccaaatttgcatcctagcttggtcactccctagcaatagtttgctgtaagtcttggagcctcagtttaccccctctgtgaaatgggcacgtgtgttggaagaggattaagcaagatggcacaaatggaagggagggagctagaagtcctcggtggcatggaagggcccggaggctccccacagggtccaagcccccaactgcacctcttcttctaatctcctcttccttctcccagagctttgatgctgtcttggaggccctgagccggggtgagcccgtggacctctcctgcctgccccctccacccggtgagaaccctgccatgcccactctctgggatggtttcaggcatacactaagttctccttgatgctgccacccctgttggtcaggcccagagaccaccctcaggccagaccagcttgtcgggggtgcagctaacaagcccctcattggcctggacctctctgtccccagaccagctgcccccagacccaccgtcaccaccgtcgcagcctccgacccccgctacggcgccctccacaacaggtaggttctgggaccctctggggttgggggcaggctggagccagactgtctacccatccgttgactcttaaccttgtccccctgtccggcccagaggtgcccccacccccgaggaccctgctggaggcgctggagcagcggatggagcggtaccaggtggccgcagcccaggccaagagcaagggggaccagcggaaagctcgaatgcacgagcgcatcgtcaaggtgccctgggggttccgggggaggtggggcgagtgggcagcccgggagccctcccacaggcagccctaacacctgtggccctcgcagcaataccaagatgccatccgagcccacaaggctggccgagccgtggatgtcgctgaattgcccgtgcccccaggtaggccttgcccctgtaggcctcgccccagtaggccccgcccccgtaggccccgcccccagaggccccgccgctggcaggctgtgccccaagctcctgttcctccagcctctgagccttggcagatgctattactccccatagcacaggctcagggagctgaatacaacatattcaagggttttgtaaacttgttaatcagtgggagcttgacattggacatgatgtgtctgcactgtagaaattggcaaaccggctggacgaggtggtcatgtctgtaatcccagcactttgggaggctgaggtgggaaaatcacttgaggccaggagttcaagaccagcttgggcaacgtggcaagaccccgtggctacaagaaatttaaaaattagcctggtgtggtggtgcacacctgcagtcccactctagatcatgccactgtactccagcctgggcaacagagcgagatcctgtctcaaaaaaaaaaaaattaattaattaaaaaaagtaaaggcccaagactctataggtgggagaggaatctgcatctccaccataatggtgtgagttggtctccatcctgacacacaataaccaggcctcgactggccacccaggcttccccccaatccagggcctggaggccaccaagcccacccagcagagtctggtgggtgtcctggagactgccatgaagctggccaaccaggatgaaggcccagaggatgaagaggatgaggtgcctaagaaggtttgagggttggggccgggcgcagtggctcacacctgtagtcccagcactttgggaatccaagatgggaggatcgcttgaggccaggagtttgagaccatcctgggccacacagtgagacccccgtctctacaaaaaaattttttaaaattagccaggcatggtgggactcacctgtagtccctgctacttgggagactgaggtgggaggatcacctgaactaaggagttcaaggctgcagtgagccatggtcatgccactgtacgccagtctgggtgacagagcaagacctcatctccaagacaattaaaaaaaaaaaaaagtgtttggtgagaattgcttgaaccgggaggcagaggttgcagtgagccaagatcgtgctactgcactccagcctggacgatacagtgatactctgtctcaaaaaagaaaaaaaaaaaaaaaaaggtgtttggggccaggggctttgagtgaggcaggggagtagcaaagtcctgggagcccactaaatgaccactgttgtcaccatcagaccctgatccttggggactggactcatcacaggcgctacgaaatctctaacatcctctctcttcctctacagcagaacagccctgtggcccccacagcccagcccaaagccccaccctcaagaactccccagtcgggatcagccccaacagccaaagcgccccccaaagccacatccaccagaggtaagttccccctccccgccccagctgcctgttgcctggctgtggcctgggcagcacccatagcagctcctatgcccacagcccagcagcagctggccttcctagagggccgcaagaagcagctcctgcaggccgcactgcgagccaagcagaaaaacgacgtggagggtgccaagatgcacctgcgccaagccaagggactggagcctatgctggaggcctcgcgcaatgggctgcctgtggacatcaccaaggtgaaccttctgggcttgtgggaactgcccaggcacccacttgtcaggctcctgccccttagcagccacgtgaactagaagtgtattagtcaaggtccagctgctgtaacaaataggtcctcccaagacaatggctgaaaggagacagacatttattatgtttcttgcatgtaccacccagggcagtctgggctctgcaaatgggaggtcctccagggcctgagtttcttccaccttattgctttgctgcacctgagggggttgtccttgtccacatgatccaagtggatcctgtcagaaggactagagaaagaggcagagctagtagtcccttttaaaggaagtgacatcactattgcttgtctcccattggccagaactaagtaacatggccacatttagccacagaggaggctgggacatgtagtctcttgttggtgcactgtgtgaccagcctgagctccattactagggaaggggaggggatcagatctggggagacacttagattctgccacttaggacaggaccattcctttttctctgagcatcatttttctcagagaagtggggatggccacccctgcctcaaagaaagacagccaggattcctcatgtgatagaatagtactcataataggaaacatttgaggagcttgaactgggcgcccagcaaaggccacccagtttaaggaagtgacatcacttttgcttgcctcccattggcccaaacagtcacatggctacatttagcctcagaggagcctgggacatgtagtctttgctggacactggagacatggccttgagcaaaaaaggcaaaaatccacactctctctggacatggtgggtcacacctgtaattccagctacttgggaggctgaggtgggaggattccttgaggccaggagctcgaaactagcctgggaaacacagtgagactcactgtcatggagtggatgttctaattgagagaccacaagaaacacacaaataaatacagcaccttatcacggcccatgaagactgcaccatctgccccatcagctcccttgcctggtctctttcttgtttttgttttgttttgttttgttttgagacggagtctcgccctgtcatccaggctggaatgcagtggcacgacctcagctcactgcaacctctacctcccaggctcaagcgattctcctgccttagcctcccgagtagctggaactacaggcacacgccaccatgcccggctaatttttatatttttagtagagatggggtttcactatgttggccaggctgggcttgaactcctgacctcaggcaatccacctgcctcgacctcccaaagtgctgggattacaggcatgagccactgtgcccggcctgccccttctctttcacccaccccctcgctcactcttccccttgctgtctggtagcctcaaacaccaggcactctgcaacctcagggcctttgcacatgcagttcccactgcctgaatgcttttcccacagacacctgtgtggttcactttctcccatcattaggtctctgctcagacatcacatctccaggaggcctaccctgagctgtctaaaatccctccctgtcacccagatccctctgctcctcctcccagctctgcctctccctgtggcatgtatcaccttctactctctcatatgatttacttatttcttctgattattgcccatctcccccaagagaatgtcagccccacgagggcagggattttgttctctcttcttcatccttgtgtccccagccccaaagcagagcctagcgcacagtaggggctccatacatgatttctcaaactcttgagctcaagcaatccacccgccttagcctcccaaagttctgggattatagacatgagccactgcacccggcaccatacatgatttctggggtgactgaaggatgcccttgttaaatgggacaatggaaggatcaagaagaaagaacagaggccgggcatggtctttcatgcctgtaatcctagcaattaaggaggccaaggccagcggatcacttgaggtcaggagttcgagaccagtctggccaacatggtgaaaccctgtctctactaaaaatacaaaaattagccaggtgtggtggcaggcgcctgtaattccagctactcaggaggctgaggcaggagaatcacttgaacccgggaggtggaagttgcagtgagctgagatcccgccattgcactccagcctgggcaacagagcgagactccatctcaaaaaaaaaaaaagaccagagaagggtgacagagccgtggtcagggaatgcccctcgtcaaggaagaatgacatttctgcagagccctaggtgggcctgcttgtcctccttacccccgccaccagcctcgtcctccccaggtgccgcctgcccctgtcaacaaggacgactttgccctggtccagcggcctggcccgggtctgtctcaggaggccgcccggcgctatggtgaactcaccaagctcatacggcagcagcacgaggtgagggggaggcccccagcccatcccccaggagcgtgaccctccttcccctctcttcccttccctcgactcactgccttctgtttccccagatgtgcctgaaccactcaaaccaattcacccagctgggcaacatcactgaaaccaccaagtaagtgccctgacctgtgccagacacttgcacccccagccacccatccccagggccagggacatgagcagggccctcccaccggcaggtttgaaaagttggcggaggactgtaagcggagcatggacattctgaagcaagccttcgtccggggtctccccacgcccaccgcccgctttgagcaaaggaccttcagcgtcatcaagtaaggctcctgatctacgccccaccacgtggccccagtggccctttggtggcggtggggcgggttgtgctccccagaagctggcacaagatttacatctggaagaaattttggataggtggaagagcacagagcatgcaaaggctctggggcaggcatgagatacaagtgaaggatggtgagggtgcagtcacagtgacgcatttgggaaagatctagagagtgcaaaggtgtatcttgtcccagggcctgggtgagtccacgggggaccagagatgagtcacggctttggtgggtgttagtcttggtactatcaagtcttcccatgcccagaggagcggggattgttttctccactttatttttatttttattttgagacagagtctcactctgttgcccaggctggagtgcaggggtgtgatctctgctcactgcaagctccacctcctggattcatgccattctcctgcctcagcctcccgagaagctgggactacagccgcccaccaccacgcctggctaattttttgtatttttagtagagacgggatttcaccgtgttagccaggatggtctcgatctcttgacctcgtgatccgcccacctcggcctcccaaagtgctgggattacaggcgtgagccaccactcccggccttttttaaaattttttttctgagacagtctcactttgtcacccaggcgggagtacagtggcgcaatctcagctcacttcaacctctgcctcccaggttcaagcaattctcctgcctcagcctcccaaatagctgggactacaggtgcccaccaccatgcccagctaatttttgtatttttagtagagacggggtttcattcagttggccaggctggtctccttaaatgatccgcctgccttggcctcccaaaattctggggttacaggagtgagccactgcgtccggcccattttctccactttctaaatgaggttaggtgcagccactagccctccggtggttcccagctgcccttgggataacccccaccccttaccctggctcccccatctccacacagcctggctccttgtcacctcttctctgcctcctgtccccgcttcactcagctttggccacaagggactctttttggtccctcctacaaacaaagtgtgttcctaccccaagcctctgcatcagctatttcttccgccttcaccctcttcctcaggtctccatgtggcagctccctcttgacatctagagtcacctatgatgtcaccttccctctaagaggccctccctatctatccgagcagtctcttctgagcacactccactctcccctctctgctgagttttttattgtttttctatttatgtacttatgctcatctgtccactcagctagattgagcacagggtatgggtatttacttctagatccccagcagctagggtactgactggcacatagtaggtgctcaagaaatattgtgaaatgaggccaggcgtgctggctcacgcctgtaatcccagcactttgggaggctgaggtgggtggatcacgaggtcaggagatcgagaccattctggctaacatggtgaaatcccgtctctactaaaaatacacaaaattatccgggcgtggtggtaggcgcccatagtcccaccttcttaggaggctgaggcaggagaatggcatgaacctgggaggcagagcttgcagtgagcagagatcgcactgcactccagcctgggcgacagagtgagactgtctcaaaaaaaaaagaaatattgtgaaatgaatagaaggtcccccagcaactaggacactagctggtgctttaataggactcaaaaaatattaagtgaggccaggctgggaggccaaggcaggcggatcatttgaggtcgggagttcgagaccagcctggccaacatggtgaaaccccatctctactaaaaatataaaaattatccagcagtggtggcgggcagctgtaatcccagctactcaggaggctgaggcagaagaatctcttgaatctgggaggtggaggttgcagtgggctgaggtcgtaccattgtactccagcctgggcgacagagcaagactctgtctaaaaaaaaaaaaaaaatatatatatatatatatatatatatacacgtatatatatgtgtatatatatatacatatatgtgtgtatatatatatatacgtatatatatgtgtatatatatatatatacacgtatatatatgtatatatacacacacacacacacacacacatatatattaagtgaaaagaaggtcccccagcagctggggtactggctggcacatagtaggtgctcaagaaacattgggaaatgaaggaaagatctcccagcagctagggcactggctgatgcttagtaggactcaacaactgttaagtgaagggaatatcacccagcagctagggtacctagcacacagtagataccaaataaatatacacagactgaagaaaagactcgaaagtgatccattgccaacctgaacagagaactctagtctgtctgattctaaaatgagcccaggagctgagacacccccgaaggccagggtggggtttgttccctgcccccactgggggaagagaaggcaggcgggcagtgggactgaggtgcctctgtttccctgcccacctgcctgcccacctgcccacccggaaggatcttccctgacctcagcagcaacgacatgctcctcttcatcgtgaagggcatcaacttgcccacacccccaggtgagggggctgtaggcaagggtcagggtcatggggaccccctctctgcccagctctgaccgttgtttgcccacaggactgtcccctggcgatctggatgtctttgttcggtttgacttcccctatcccaacgtggtacgtggggagctgaggaggggagggctgcagcctcagtgggccaaagccaggtcccaggccccctagatttcctgcctcctctctggtcataggaagaagctcagaaagacaagaccagtgtgatcaagaacacagactcccctggtgagcctcggctggaagcaccctacccctactcccttgcagcagaagggacataagacaatggcctgaccccacccaacttcctctccctccttcctcctgcagagttcaaggagcagttcaaactctgcatcaaccgcagccaccgtggcttccgaagggccatccagaccaagggcatcaagttcgaagtggttcacaaggggtgagctagagagagccatggccgctgggtgggctccaggggaggggagctcctctgaaccaaccatcctgtccccactatacacacatgcacacagggggctgttcaagactgaccgggtgctggggacagcccagctgaagctggatgcactggagatagcatgtgaggtccgggagatccttgaggtgagaggtggacattcatccgcgtgctccggtatggccatgctactcgttaacattattaaaacacttcctgccttgagccctctatgagcctgtctgttgacccagcccctcccctcagagcctcagacctccctactgcccagccctaaatacttgcagtaccccactccattatgatcaactggtatctcagccataccatgggctcatattttagaaaccactcttggccaggcatggtggctcatgcctgtaatcccagcactttgggaggctgaggcgggcagatcacgaggtcaggagatcgagaccatcctggctaacatggtgaaaccctgtttctactaaaatacaaaaaaattagccaggcatggtggcgggcgcctgtagtcccagctactcgggaggctgaggcaggagaatggcgtaagtaaacccaggaggcggagcttgcagtgagcccagattgcaccactgcactccagcctggacaacagagcgagactctatctcagaaaaaaaaaaaaccaaaaaaaaaaaccagtcttgttctcccttgtcctggccctgggcctctagtcacttcctgcttcccaccaacagtttctccttacccccacccaggtcctggatggtcgccggcccacaggggggcgactggaggtaatggtccggattcgggagccactgacagcccagcagttggagacgacgacagagaggtggctggtcattgaccctgtgccggcagctgtgcccacagtgagaccccccacccccacccatcagcaaccccagggagggaagcttggttcaggggcccaggactcacaggactggttctctcctctgaagcaggttgctgggcccaaagggaaggcccctcctgtgcctgcccctgcaagggagtcagggaacaggtaggtatctgggccagggcatgctggagaaaacacccaattcccctctcagccccacctggacagtttcccaccaggcacaaattggaccacgtccctctcctgctgcaaaacctttcttggcaccccttttcccagaggatccagtttaaactccttggtttggtctttaaaaccttttgtgatctgaccattgtcaacatatccaggcttctctctccctactccctcctgtggttcatgtccatgaatagttttcactggcctctggacttctgtgggttccagtgccctgaacacccctacctagggtaggggtgttccttgttcctctgcccacctctgattccttctttggatcccaacttggctgttacctcctccaggaagccctccctgaccactaggcatcatagtttcctgggtgtgcagccatcatccccgctaggttttgggatcagtaacaccgggtggttctcggctgtctcccaccatacccccagtgcccagtgtgtcttttttttttttttttttttttgagacagagtctagctctgtcgcccaggctagagtgcaatggcgcgatctcagctcacagcaacctccgcctctggggttcaagcgattctcctgcctcagcctcctgagtagctgggattacaggcatgcgccaccacacccagctaatttttctatttttagtagagatggggtttctccatgttggtcaggctggtctcgaactcccgacctcaggtgatctgcctgcctcggcctcccaaagtgctgggattacaggcatgagctaccatgctcggcttttttttttttttgagacagaatcttgctctgtcacccaggttggagtgcagtggtgtgatctcggctcattgcaacctccagctcccaggttcaagcaattcttctgcctcagcctcccaagtagctgggactacaggagcacaccaccatgcccagctaattttttttctatttttagtagagacggggtttcaccatattggccaggctggtctcgaactcctgacctcatgatccactcacctccgcctcccaaagtgcagggattacaggcgtgagccactgtgcccagcccagtgtgtcttttgaattaacagggttgggctgggggaatctctgcagtcccttatccttcctccaccccttagatcagcccggcccctgcatagcctcagtgtgctggcgtttgaccaagagcgtctggagcggaaggtgggtatccatcctgccgggctacatggggcaggactggggagtctgcaggcccaggcaggatcctcacaggaccctctgtatcctctagatcctggccctcaggcaggcgcggcggccggtgcccccagaagtggcccagcagtaccaggacatcatgcaacgcagccagtggcagagggcacagctggagcaggggggtgtgggcatccgacggggtaggggtttggagatgggcatctggtgggggaggagctccaggataggcatggggggggaggtgctcagggatgcatatctggtgggggaggggctcggggatgggcatctggagagggaggggctcggggatgggcacctggagggggaggggctcggggatgggcacctggagggggaggggctcggggatgggcatctggagagggaggggctcggggatgggcacctggagggggaggggctcggggatgggcacctggagggggaggggctcggggatgggcacctggagggggaggggctcggggatgggcacctggcgggggacgggcttggggatgggcacagtccaggagggttgtgggcagtgaggccccaccctaagcctccattcccccgccatccattctcagaatacgcagcccagctggagcggcagctgcagttctacacggaggctgcccggcgcctgggcaacgatggcagcagggtgagctggtcgcgggccgggtgggcactgggcagcgggcagggtggggcctgcagggactacctgctgaatgcccatcccccacaggatgctgcaaaggaggcgctctataggcggaatctggtagagagtgaggtaagcagcttaggagatggggtggttgggggatcactgtggtcgtagcccacctccatgaccccagtggcctcctctcccccagctgcagcggctccgcaggtgaggagcccatggggcgggcagcccccagaaagcgggcagcaggccccgataccgggaagagccgacacagccacgaaccagacaagcagacaatcagcggacaatcggttctggactcacccctcatccgggcccccagccccgccagagcctccgtggctgcgggtgttgggaaccatgcctgccagccagtatgtgcccctcacccaggcctggctgggccctggagagtcctgtttgcacagcccaggggtgtccggcctctggcccgccccggagcagggagggtggctggggccaagccccgagggcccctgcaagcactttacttcctgttcctccccagccttaaccccaaagccctcctgcaccccaaagaagccactgaggctggccgagccacactgtctccccaggggcgtcgacctggcccagctgggtccccagggccagcacatggaataaaatagccagggccacactcagcccagctctgtcctgtctgtttcttgctcagaccctcggtggccaggctaggtcttcccacccaccccccggttcccctggaagtggatggggaggcgcctgttagggaagcagttttggggagggacagtgtgcttgtgaaaggtgctttttttttttttttttagagaccgggtttccctctgtcacccaggctgcagcgcagtggcacaatcagctcattgcagcctccgactcctgggctcacatgatcctcctgcctcagcctcctaacggattacagaagggcaccaccacacacccagcttgaaggatgcatttcattcccatgcttgctgtggggggggatacatgtgagggtccctatatctgtcacccagtgttttttcagtgggtggccttgggcgtccctgcaatcacacgtggctaggtcgcacagggtgctgtttggtgaccccagtgtgtgcctcaagacctcaaaattcagtcctgacccacttagcatcccagagcctcagtttccccagctggactggttgtggggaggagtccgtggacagagcccccaaagggtgcctggtccgtgctgagtgctggaagggtttggctttattgttgctgcctccatctgtgttgggagtttggggtagggtgtgtcccgccaggccggcgtggtctgtgagcctggagtatgccagctgtgtgcctctgtgtctcggccagtggcaggcagagcaggcccagccctggaggcccaggagagccagaccaagggcccctggtgggcgttgtctcctcagtccacggcccagcggagtcccaggagtctgagctgctctgctgggcctctctaggatcaggggccccctgcccgtggcccacgtggggtggtgggaggcagccggatcaggacctgctccggattccctgccgtgtccaccacacgcaggtttgggagccccaggaaggcctcagccgcgatgctcgtcatgtgaagcctgttggccctgcacagagaggcggtcatgaccctcccaggccctcccctgcccacctccacccctccggtcaccctcggggcacctgaggaagagggcacgcaggcggggtgtgctgaggaaggcctcggggcccacgtggccgatgcggttgccctcgaggtgcagctcctctagggcctcaggcaggtccgggggcacaaaggacagctcattgtggctgaggtccagcatctgggcagggggttatagatggcatcgtggcagccccaggcctgggccactcagctcagccagcccccaacctctctgagagtcccctgcccccttcataccagcctggcccttctgccccccaccccccatgattgccaaattcctcccttctgcagaggtaaactaaggcccttcccaggaaggcacagacagacaggtccccacttgattaaatgagtcagtcattgaatcgcaccatacctctttcatcactttttttttcaagagacagggtcttgctctgttgcccagtctagagggcagtggcccgatcacggctcattgcagcctcaaacttctgggctcaagcgatcctcctgcctcagcctcctgaatagctgggactacaggcatgtgccaccacgcttggctatgtttttttggtagagatagggtcttgctgtgttgccaggctggtctcaaacccatagcctaaagcgattctcctgccttggctccccaaagtgctgggattacaggcatgagccacctcacccagcctcctcatcaccttctaacccactcttatcattttcttgttctgattgctttaccagctaactagaatgtttgggacgtggcagggcaggcagggggatggaggggccctggggacagtgtggctaaccagcctgtgcctgacctggagggcttggagctcatgccaggtgcctggcccgatgtcgccgacccggagccggttgtgcgccaggctgagctcccgcagttggtccaggccggccagaggctcgggctcgagcatccgcagctggttgcgttgcagctgcagggtgcgcaggccagtgggcaggcccatgggcagccgggttagctgattccctgccaggtcgaggctgcgcagggcacgcaaccggcggaaggcccggtggtgcacacgggcgctggccaggcggttataggccaggttaagctccgtcaggcccggtgtggcgaccaggtcacgggcacccagcgcggccacgtggttgtggggcagcaccagggcacgcaggcggcggggcagggctggaggcacgcggtccagcccattgccatagaggtgcagcgtgtgcaggccccgcagcggccgcagagccccggcgggcagccctgagctccccagctggttgtgctgcagcaacaaatagcgcagaccacgcgccccgtgcagccgagccgcctccacctgccggatgcggttgcggcccaggtgcaggatagccagggtccggggcaggccggcgggcactgtggtcagctggttgtgggagagatccaggtattcaaggctatgcagcttgctggaaggagagagggtcggtgttaggtggggcacttggagtggggtgcctgacagattttggcggggaggctggggagtggtcctgagacagatttaagctggagattttgacttgggagtgatgcgtggagagagctgggtgggaggtaaacttggggtgcccagggcagattccagcctgagagttagctatgggggtgaccagggtagagccgagatggaaaggcatgtgagacttacgatgtcagtgcagggctgtggggaacagggacacctacccagtgctctgccgagcccagtgagcagcaggcactcagtaaatgaggccgtggcttaggagccagtcagggaagggggactgaaggttgggacccccgactgtaaattctcagcccctgctgccccccaaccagcctgtacctgaaggtggtggcatccaggccactgtctgtcagctggttgtgctggaggtagagctcacggagttgagtctggcggctcagggctcctcggggcaccttggagatgagattgttctggagaaggaagaagagaatgagacttgagtctgggatgagggcagcgggaagccacagacggctcttgagtaagggagtgacgaggagcttgccttgagctcaaagcgatttccaataaagtgattcaaagaaggataactctgaccactggcattctgaggggcaattgagaagaatggaaagctaggaactggaggggtccccctggaaagaggtgaagagagtctggcccggggtgggacctacagcagggctacctgcaggtggagccgctcgagtgagggcggcaggctgggcggcaggtagctgagctggttgttggagaggctgagggtggcgatggcctcggagccgcggaaggcgtcggggggcaggccagcgttgctcagctggttgttgtggaggtacacggacctgaggagagccaggctccggccaccagcctgcccctcgcctcctaccaccccactcccgcaccacaccctgctcagggtcgccttcagtgtgtgtgtgtgtgtgtgtgtgtgtgtgcgcgcgcatgtgtggagtctgtgtgggaatgtaattgtgtatgtgtgcatgtgactgtgcgtaggtgtgcaggtgagtgtgcatgtgtgttgtatgaatagacgtgtgtgcatgtgtgagcagtgtgcatgtgtaagtgtaatgagtgcatatgtggagtgtgtgtgcacgtgtgtatgtgattgtaagagtgtgtgggcgtgcatgtgtgtatgtatatgcaagtgtgtgctatgtgcctgtgcataagtgtgcatgggtgagtgtgtgcatgtgattgtaagtgtgggtgtgcatgtgtgcatgcctgtgcataagtgtgcatgtgattgtgtgtgtgcagccgagtgtgcaactgtgtgtatgcatgtatgtccatgtgtgcatgtgatcatgtgcaaaagtgtgagcattgtgtacatatgtgcatgtgtgtgcttgtgtgtgcatgtgattgcgtgtgcatgcatgagtgtgtgcctgtgtgcatgtggttggaagtgtgtgcaggtgtgtatgtgagtctgtgtgtgtgcttgtgtgtgcatgtgattgtgtgtgcatgagcatgtgttcatgtggttgtgtgtgcaggtgtgtatgtgagtctgtgtaagtgtgtgtgtgtgtgtgtccctgcacatactgtctccacctcagtctggagttctgacacagcatacagggccctgtctccccgctcactctcctcccagggtagaactatgccctcttcccactccccaaggctagggatctgtccctggttaagccctccagggcaaggcattttgtttctgtttttgtttttaattttgagacagagtctcactctgtcgcccaggcttgagtgcggtggcacgatttcgtctcactgcaaactccacctcctgggttcaagccagtctcctgcctcagcctcctgagtggcggggattacaggcgcacaccaccacccccagctaatttttgtattttaagtagagacagggtttcatcatgttggccaggctggtctcgaactcctgaccccagatgatcctcccaccttggcctcccaaagtgctaggattacaggagtgagccactgcacccggccgagggcaaggtcttaactccctcattgctcctagaaccggggcatgacacagatgtatctgaggcctgggggcctgggctgggccagggtctacctgagtgccggcttctccccaaaggtgagggggaagatctccatcacttggttggcagccagatccgcgacacggagggaccggggcagaaactgaggggccactgagagctgtggggacacagcccacagccggactggtcctggtgcgccttggccccaccacttccccagcagagctgtcccctccacaccctgggctgagtgactgaagctgcaccctcactgggctcggcctgcgggtggggctgggggctcaccttgttgtgagccacgcagaggtgctgcagctgggtgagggactcgaaggcctcgtcaggcaggcctgggagagtaggggggcagtgaagggaccccaggcctgtcttgggtggagggggagtctgggctcccagctgccccaggactctcggccggggaactggcagaggctccccaggccctcagatcccctcctccccatccctactcaaaagccacagcccccaacccccaccccagctcctgagtttccatcctgctcagcaaagggcagttctgggaactgccacagagctgcccgcagatggggcgggggagggggatggcagctgagacctcggtcagtcctacagccccagagaggccgcctccctctgccccctcaccttcggaggagatgaggttgttgtggaggttgagggttcgcaggccactgaggcgggacagctcattgtaggggagttcctggagctggttgttctgcagggtgagagttggggtgttcacacccgtgaccccgtgaccaagtgaccccaagcactgattctcaacttcccatcagcccaaaccagccccataccatcatcacccccacagttaatcccaaacaccccatcactctgacccagtcttataactgccaagatgtcaaaccccaaacccccacaatcgaccccaaatgtgccatcacccccacaatcgaccccaattcccccaacacccccacaatcaacccaaatgtgccatcacccccacaaccgaccccaaatgcaccatcacccccacaatcgaccccaaattcctcaacacccccacaatcaaccccaaatgtgccatcacccccacaatcacccccaaatgcaccatcacccccacaatcgaccccaaatgccccaacacccccacaatcgaccccaaatgcgccatcacccccgcaatcaaccccacatgccacaacacccccacaatcgaccccaaatgcgccatcacccccgcaatcaaccccacatgccacaacacccccacaatcgaccccaaatgcgccatcacccccgcaatcaaccccacatgccacaacacccccacaatcgaccccaaatgcgccatcacccccgcaatcaaccccacatgccacaacacccccgcaatcgaccccaaatgtgccatcacccccgcaatcaaccccacatgccccaacacccccgcaatcgaccccaaatgtgccatcacccccgcaatcaaccccacatgccccaacacccccgcaatcgaccccaaatgtgccatcacccccgcaatcaaccccacatgccccaacacccccgcaatcgaccccaaatgcgccatcacccccgcaatcgaccccaaatgcgccatcacccccacaatcgaccacaatgcgacatcacccccacaattgaccccaaatgcgccatcacccccacaatcgaccccaaatgtgccatcacccccaccatcaaccccacacgccacaacatccccataaccccaaactccccatcacactaactccaaacaacactataaccgccaagatgttgaccctaacaccactaatcctcagtccccgacaacttccagcatgtccacgctcacccctctcatcttgggcatgcagagccaatctgccaaggcaaagctccatcacagcctgctctgcaccgccctcctgcaagtgtgttcctataccccaccacgctcctcagctctggggcacccctccagctcccctcaccactgggtctcagccctgcatgcccccactcccctccgtgggccccacctgcagggagaggtgctgagcggctctggtgatgttgtccgggaacactcgaaggtccaagccatcacagtccacagtgtcgactcgggggcaggagcagcgcaggggacaggcccggggcaggggctgcaagctctcccccaggtgggggaaggcagcgtcttccaagccggcgacgggcgggggccccggcaacagcaggagcagcagcaggctcggccactgcgggggagggagggtcagcgtgtctccaggctgggcgcagggtcgccatggtgactggagcatcccctcctcggggagggtcttggtggggaggcagtggccagttggcagagcaggggtgggggggcaggcaggccccaccctcagaccctcccgtgccccaccttaccatggccagccctgactctgccatctcgcccaagctgctgaccaggacttcctaatggaaaccaggcggtcacctcctggagcctctgctgtggccaccaccgccccccatctccagacccatgccaccccccacaacagcctgttctcccggggctttgggggagctggcccacccccttccccgccctggggaggacgggcaggcggccggatggggtggtgaggacaggccagcccgtccccttggtcccccccaacaaccaccccatctctgctttcgtaacctcagccagcctgggccgggccacaagaacaaggaatgtttggggaaaagctgagattcgtcctgtctggtatttgggacgaccgcaggagtaggggtggggatggagggatggggggagcttcggggcacaggagagttccgagaagcaggggcgggcagcagcgagggattagggaggcctgagcttagcctggcagcccagatgccagcctgggagctcctgaccaggtctgctgcccggcacccacctcccctctgctggctggtcttgctccagacacccgccccctcctccccccgcaaatggccacagccgcctggaaggaaattacatatatccaggcatcagcctggtggttaagagtgtgagcttggtgccagcctgcctgggtttgaacctgggctgtgccacctctcagggccttggtttccctttctggggtaatggttggctcaccaccccacactcccccacagtgttgtaaggattatacgaagtgtgcattcagaacagtgcctggcatatcccagggctttggcacccgtggatgggggtgacaagctggtctccacatgaggtcaattctcccagacccacaacttaccaacagggcggcttcagacaggtccttctcctgcccagacctcagctttcccacacataaaatgggattgacaggctgggtgctggggtttatacctgtaatcccagtgctttgggaagctgagacaggaggatctctcttttgttttttgagacagagtctcactctgtcactctgtcgcctaggctggagggcagtggcgtgatctcggctcactgcaacctccacctccggggttcaagtgattctcccgcctcagcctcccaagtagctgggattacaggcgcctcccaccatgcccagctaatttttgtatttttagtacagacagggtttcgccaagttggccaggctggtctcgaactcctgacctcaggtgatttgcccaccttggcctcccaaagtgctcggattacaggcatgagccaccacatctggctagaaggatctcttgaggccaggaatttgagaccagactgggcaatatagtgagaccctgtctctaaaaataaatttaaaaaaaaattagcctgggctgggctccatggctcacacctgtaatcccagcactttgggaggcttaggcaggcggatcacctgaggtcaggagttccagagcatcgagcccaacatggtgaaatcctgtctactaaaaatacaaaaattagctgggcatgatggcacgtgcctgtaatcccagctactccagaggctgaggcacgagaatcgcttgaacctgggaagtggagatcacatcactgcactccagcctgggcaacagagcaaaactctgtttcaataataataataataataataactaacctggtatggtggtgcacacccacagtcccaggtactcaggaggccaaggcaggaggaacacttgagcctctgggctcaagtttgaggttacaatgagctatgtgccactgcacgccactctgggcaacagaataaaaccctgttattaaataaagaaaaaaaaagtggggggatgacaaaccccccccctcaaagagctgtcttgaagcagaacgaggcagtgggtagaacattttaagaatggtggctgggtgtggtggctcatgcctgtaatcccaacacttttggaggctgaggcaggaggatggctctaagcccaggagtttgagaccagcctggtcaataatggtgagacccccgtctctaaaaaaattttttaaaaactttgtggggggccaggcgcggtggctcacacctgtaatcccagcactttgggaggccgaggcaggtggatcacaaggtcaagagatcgagaccatcctggctaacactgtgaaaccccatctctactaaaaatacaaaaaattagctgggtgtggtggtgcgcgcctgtagtcccagctactcaggagcctgaggcaggagaatcactagaaccagggaggcggaggttgcagtgagccgagatcacgccactgtactccagcctgggtgacagagcaagactccgtctcaaaaaaaaaaaaaaaaaaaaacttagcgggggccaggcgcggtagctcacacctgtaatcccagcactttgggaggccgaggtgggcagatcagctgaggtcaggagttcgagaccagcctggccaacatggcgaaaccctgtctctactaaaaaatacaaaaattagctgggtgtggtggcatgtgcctgtaatcccagctacttgggaggctgaggcaggaaaatggcttgaacttgggaggcagaggttgcagtgagcagagattgtgctactgcactccagtctgggctatggtgcgagactctgtctcaaacaaaacaaaacttagcggggcatggtggtgttgcctgtagtcccagctaccagggaggctgaagtgggaggatcacatgaacccaggaggttgaagctgcagtgagccgtgttcatgctactgtacaccagcctggatgacagagtgagaccctgtctcaaaaatgaatgaataaataaaaataaaagtatagtgtcggccaaggacggtggctcacacctgtaatcccagcactttgggaggccaaggcaggtggatcacctgaggtcaggagtttgaaaccaacctggccaacatggtgaaacccagtctctactaaaaatacaaaaatttcctgggcacggtggtgcatgcctgtaatcccagctactcaggaggctaatgcaggagaattgcttgaacctgagagctggaggctgcagtgagccgagatcacaccactgcactccaggctgggtaacagtgagactccgtctcaaaaaaaaaaaaaaaaaaaaagtatagcgtctgctcagcttgggagtggccaaggccaggagttggagtctcccagaagcagagcttgagacaaggattgagtgcatttattccagagaaggcaggcagtgatacaggggagggaggaagtgatcaagaaacagtggctgggcgcagtggcccacgcctgtaattccagcactttgggaggctgaggtgggcagatcacctaaggtcaggagttcgagaccatcctggccaacaaggtgaaaccccgtctctactaaaaatacaaaaaaattagccaggcatggtggcaggcacctataatcccagctacttgggaggctgaggcaggagaatttcttgaacctgggaggtggaggttgcagtgagccgagattgcatcactgcactccagcctgggcgacagtgcaagactccatctcaaagaaaaaaaagttaagaaacatgggccaagagaggtggttatctgttcatgtttcctagggctgtgtgacctcctgagggtctctcttcatggggtgagacaggagacgggtcttagtttaggccagaagagaacaacagctcctatctcaagtactccccatgggatggatggccattagcttggacattgggtggaagttcctcagtctcttcagcagtgtaatggggctaaccctagggagacaggactactgtagcagtcctagcccccagggaagcagcaataagaaccaagatgtttgagttccgggcaagcctctttccattgcaaaggaaggagaacccaaactgaactagctaatacaaacaagggcatttactggctcatgaacagaaaacctgtatccttcaggcacagctggatccaggggctccagtgatctcttctagatgaattctctcttgaactctgaactctacttgcaggcttctgtatgtggtgctaagacattcccagaaccaataagcattcttccctggctttagtagaaagcctcagacttaaatctcattggcctaaatttggtcacatgtccatccagagccaatccctggggccagagggatggaatgtgctgattggctaggaacctaaccattgttcctgtaaataacccactggccttatcttcctgcaacaaactccccttctgccacactgtcctgtccagtcctgcctggtcctgcccagttctgcattacccagcaggggcctctgcagggataacaatggagtatggtccatcaatgtggccccagtgtccagcatggagcctggtataatcagtatttagtaaatatttacagaatgcacataggattggctgtgcgcccctgtggctcacacctgtaatcccagcactttgggaggcagagacgggcagatcatgtgaggttgggagtttgagaccagcctggccaacatggtgaaaccccatgtctactaaaaaatacaaaaaaaaacaacaaaaaaaattagctgtgtatggtggtgcacacctgtaatcccagctactcaggaggctgaggcaggagaatcgcttgagctcaggaggcacaggttgcagtgagccgcgatcacaccactgcactccagcctgggtgacagagcaagactctctctaaaaaaagacagaaagggccaggcacggtgtctcatgctgtaatcccagcactttgggaggctgaggcaggcggatcacctgaggtcgggagtttgagaccagcctgacaaacatggataaaccccgtctctactaaaaatacaaaattagccaggcatggtggcacatgcctgtaatcccagctactcaggaggctgaggcagaagaatcacttgaacctgggaggcagaagttgtggtgagctgagatcgcgccattgcactccagcctgggcaacgagagtgaaactccaaaaaaaaaaagaagaaaaaagaaagaaagaaaaggaatgcattcacagttctggaggctggaagtggttccaggcaacttggtgtttcctggcttgtggctgcatcaccctaatctctgcctcagtttccacgtggccttcttcactgagcctgtttctcctctcctgtctttatttatttatttttgagatggagtctcgctctgttgctcaggctggagtgcagtggtgtgatcttgattcactgcaagctctgcctcctgggttcaggccattctcctgcctcagcctcccaattagctgggactaaaggtgcatgccaccacgcccggctaatttttttgtgtttttagtagagacggtgtttcatcatgttagccaggatggtttcgatctcctgacctcatgatccacctgcctcagcctcccaaagtgctgggattacaggcgtgagccaccgcgcccagcctctcctctcctgtcttttataaagacactggtctttggattcagggtccactcagttaatctgggataatctcatctcaagatccttaactgaattacatcgcaaagacctgttttccaaatcaggtcacattcacggcatcggggagacaggacatctacctatctatttgagggacaccattcaaaccacgacatggatttacctgggtagagataatcttgtgggaaaaaaaattgcagaatgatgctaacaatgtagatcatttccatatattaaaacatacatattggctagctctggggggagacctgaatgcttgtggctgggggcaaagagaggcttgccactggatatccttgtacatctgtttttgttttgttttatttattaaattaattaattaattaatttttttgacagagtctcgctctgtcacccaggctggagtgcagtggcgcaatctcggcggctcactgcaagctccgcctcccgggttcacaccttctcctgcctcagcctcccgggtagctgggactacaggcacccgccaccatgcctggctaaatttttttgtatttttagtagagacagggtttcaccgtgttagccaggatggtcttgatctcctgacctcatgatctgcctgccttggcctcccaaagtgctgggattacaggcgtgagccaccacacctggccctatttgtttattttgagacaaagtctctctgttgcccaggctggagtgcagtggcgggatctttgcttactgcagcctccgatccctgggttcaagcgattctcgtgtctcagcctcccgagtagctgggactacaggtgcaggccatgatgcctggctaatttttgtatttttaatagagacaggttttgccaagttggccaggctggtttcaaactcctgacctcaatgatccgcccgccttggccttccaaagtactggattacagatgtgagccactactcctggcctgtttggggttttttttttgtttgttttggggtttttttgagagggagtctcactctgtcacccaggctggagtccagtggcacgatctcggctcactgcgacctctgcctcctgggttcaagcaattcttctgtctcagtcttcccagtagctaagactacaggtgtacaccaccatgcttggctaatttttgtatttttattacagacaggattttaccatattggtcaggctggtcttgaactcctgatctcaggtgatccacccaccttggcctcccaaagggctgaggttacaggcatgagccaccacactcggcctgttttattttgttttttaagagacaggagctcgctatgtttcccagtctgaactccaactcccaggctcaagcaatactcctgaatagttggggccatgggcatgcaccactgtgccctgtacatctgttgaattaaatagcaaaaaagttgagcagggtgcagtggctcacacctgtaatcctagctactcaggagcctgaggcaggaggaacacttgaggacaagagttcaaaaccagcctgggcaacatagtgagaccctcatctctaaaaaaaaaaaaaattcagaaaattaggttgggcaaggtggctcacggttgtaatcccagcactttgggaggtggaggtggaaggattgcatgagcccgggagttcaagaccagcctgagaaacaaagtgagaccctgtctctacaatttttttttttgaaatggagtctcactctgctgcccaggctggagtgcagtggcatgatctcggctcactgcaacctctatcccccgagttcaagtgattctcctgcctcagcctcctgagtagttggaattacaggtgcctgccactgcgcccagctaatttttgtatttttagtagagacacggtttcaccatcttggccaagctggtcttgaactcctcaccttgtgatccacccacctcagcctcccaaagtgttgggattacaggcgtaagccactgcacctggtgttgtagaggcaggagaatcgcttgaacctgggaggcagaggttgcagtaagccgagatcacaccattgcactccagcctgggcgacagagcgagactccattaaaaaaaaaaaaacaaactttttaattagctgggcacagtggtgcatgcgtgtagttccagctccttgggaggctgaagtgggaagactgcttgagcctgggtggagtgccactgcactccaacttgggcaacagagcaagaccctgtttctaaaaaagaaaagaaaggaaatggtggatacacactgctaacttcaagggaggatgagaaacaccatctttctactgggaagccacatgttcagataaaaatggagtttcttggctgggtacagtggctcatgcctgtaatcctagcactttgggaggccgaggtgggcggatcacgaggtaaggagtttgagaccagcctggccaacatgatgaaacccgtctctactaaaaatacaaaaattagccagacgtggtggtgggtacccgtaatcccagcttacttgggaggctgaggcaggagaattgcttgaacctgggaggcagaggttgcagtgagccaagatcgagccattacactccagcctgggtgacagagcaaaactctgtcttggaaaaaaaaaaaaattgagtttctatcactactgcataaaagtgggatgacctgtaaaaaggaagcaatgaggagttaggaccacaaggaaaattgagcccaaggctttctgtgttcaaagccactggtctccaaagttgggtgtgggaaatgaatcataatttctagttctatttacctgccccatcctgttttatggcccttttccaggtatgatttaattcacaggctagaaagagtggtctaaatgcacctgtatagttgggttatttgtaaacaaatacatatacgtattaagggagagtccaagtgacgaacgatcagaaatatgggaaatcttggctaggtgcagtggctcacgcctgtaattccagcactttgggaggccgaggtgggcggatcacgaggtcaggagatcaagaccatcctggctaacatggtgaaaccccttctctactaaaaacacaaaaattagctggccgtggtggtacgcacttgtagtcccagctactcgggaggctgaggtgggagaattgcgtgaggctgggaggtcgaggctacagtgagctatgatcacaccactgcactccagcctgtctcaaaaaaaaaaaaacacaaaaaaacaaaaaaaaaacaccataaaaacacctttataataattgttgtaggcggaggtttcagtgagccaagattgcaccactgcactctagcctgggtgaaagagcaagactccatctcagaaaaaaaaaaaaaaaaaaaaaaaaaaaaggctggccatggtggctcatgcctgtaatcccagcactttaggaggccaaggcaggtggatcacctgaggccaggagctcaagaccagcctggtcaacatggcgaaaccccgtctctactgaaaatacaaaaattagctgggcctggtggtgcatgcctgtaatgccagctatttgggaggctgacgcaggagaatcacttgaacccgggagacggaggttgcagtgagctgagatcgcaccattgcactccagcctgggtgacaagagcaaaactccacctcaaaaaaaaaaagaaaaaaaaaagaattgaggtaaattgcaggacatcatgttggtgtccaccaagaattggggaattacttgatttgggagaagctgccccatcatctggtgtcagaagcgaaggattgagagtgatgtgatatagaaggaaaaacagtctgtttgtcccatgtacgtattcaactgacttgggccaaactgacttctccctagtcttcctcatatcaaaaaatggcactaacattttgctaaatattccactcagatgctaaagtcatcattaacttctctctccttgcccctatcccaatatcttgtccttgaaaatgaccccatcggctctgactatggccacttttctccattttctttctttatttttattattatttctgagacagcgtctcattctgttgcccaggctgaagtgcagtggtgcgatcatggctcacttgcagccttgaactcctgggctcaagcgatcctctcacctcagcctcccaagtagctgggagtacaggctcaggccctcatgctaatttctaaaatttttatagagatgggatctcactatgttgcccaggttggtctccggggatcaagggagactttaagcaatcctcccactcaagccatctcctgccttggtcttccaaagcactgagattacaggcgtgagccaccacggccaatattctccattttcttttcttttcttttctttttttttttttgagacggagtcttgatcagtcgcccaggttggagtgcagtggcgcaatctcggctcactgcaagctctctgcctcccaggttcatgccattctcctgcctcagcctcctgagtagctgggactacaggcgcccgccaccacgcccggctaatttttttttttttttttgtatttttagtagagacggggtttcaccatgtttagccaggatggtctcgatctcctgacctcctgatccacctgcctcagcctcccaaagtactgggattacaggtgtgagccaccatgcccggccgtattctccattttcaatgctagtagattaatctaagtcagcatcacctaccctcctggctcccccaagactattcctgcccccatcctcatcccccaagaccattctgcacatagcagtcataataacatcctcctggccgggtgtggtggctcacgcctgtaatcccagcgctttgggaagccaaggtgggaggatcacgaggtcaggagatcaagaccatcctgaccgtcctggctaacatggtgaaaccctgcctctacaaaaaaaaaaaaaaaaaaaaaaagccaggcatggtggcaggcgcctgtagtcccagctacttgggaggctgaggcaggagaatcacttgaacctgggaggaggttgcagtgagccaagatggtgccacagtcctccagcctgggtgacagagtgagactctgtctcagaaaaaaaaaaaaaaatcctcccccatgctcttttaaaaacttagagtttatttatgtgtttatttattgacacagagtcacgctctgtgtcactgaaacctctgcctcccgggttcaagcgattctcatgcctcagcctcctgagtagctgggatcataggagcccaccatcaagcccagctaatttttgtatttttagtagagacagcatttcaccatgttgaccaggcttgtcttgaacccctgtcctcaagtgatccgcccgccttggcctccccaagtgttgggattacagatgtgagccaccgtgcctggcccctttgaattttgaaacaacattattttatttttgttatttgtaattttattattattattattaaagacagggtcttgctctgtcacccaggctggaatgtagtgacgccatcacagctcactgtaatttcaaactcctgggcacaagggatcctcccgactcagcctcccacgtacataggactacagacgtgctaccacacaccagactaatgaaaaaaaaatgttttttcattgtagagacgaggtcttaacagttgccgaggctggtcaaattcttctcaagccatcttcctgtctcagcctcccaaaatgctgggattacaggtgtgagccactgtgcccagcctgaaattagacattttcagatctgcaaagaaggtacagagagttcttttattcccttcactcaatttcctctaatgttttttgggttttgggttttgggttttgttttgagacaggatctcactctgtcgcccaggctggagcgcagtggctcaatctccgctcactgtagcctccagggctcgggtgatcctcccacctcagcctcttacgtagctgggactgtaggttcacgccaccacactccgctaaattatttatttattttttttttgagagtcttgctctgtcacccaggctgcagtgcagtggcgtgatctcgactcactgaaacctccacctcccaggttcaagtgattctcctgcctcagcctcccgagaagctggactacaggcgtgtgccacctgagattacaggcccggctaattttctgtatttttagtagagacggggtttcactgtgttagccaggatggtctcagtctcatgaccttgtgatctgcccacctcagcctcccaaagtgctgggattacagtcgtgatccaccatgcctggccttgttttgttttttatttgagacaaggtctcgctctgtctcccaggctggagtgcagtggcaccatcatagctccctgcagccttgacctcctgggctcaagtaatctttctgcctcagcctcccgagtggctgaaactataggcgtgtgccagtagagtcagtgaatttctttgatgttttgtagagatgagggtttcgccatgttgcccaggctggtcttgatctcgtgggttcaagtgatcctccctcctctgcttcccaaagtgctgggcttacaggcatgagccaccgcacctggcctggtcatgtattttgagaaccttcttcaatctgggataaatgtctgatgttgtctaatggttagattgaggttctaggtttggggataatatcagacagttacaaatgtcctccctatcacatagctggggtccgtgatgtcagtatgacttatcactggtgatgttgattttgatcacttggttaaggcagtagctgccaggtgtccccactgtcttggagacagctttgctctccatggacgtagggtatgcaagaagcaggggaacctttggctaaagatacattgtgatggccgggcgcagtggctcacgcctgtaatctcagcactttgggagggtgaggtgggtggatcacttgaggtcaggagtttgagaccagcctagccaacatagtgaaaccctgtctctactaaaaatacaaagattagccgggcatggtggcacatgcctgtaatcccagctacttgggaggctgaggcaggagaatcgtttgcttgaacccgggaggtgaagggtgcagtgagttgagattgtgccattgcactccagcctgggcaacaagagcaaaactccatctcaaaaaaaaaaaaaaaaaaaaagatatgttgtgatattgtgttgtgatatatttttaaaaaaccatattttggtcttaggttttctagtacataactcctaaaacccttgaaatcagctgggcacagtggtttatgcctgtaatcccagcactttgggaggccaagacgggatgatcccttgaggtcaggagttttcgagcagcctgggcaacatagtgagaccccatctctacaaaaaaaatttttttaatgaagacaataaaaaaaaactatcttctagattgttcagaggattaaatgggctggccaggggtgggggctcacacctgtcctcccaacactttgggaagcagaggtgggaggatcacttgagcccaggtgttggagaccagcctggacaacttggtgaaactccgtccctacaaaaaatacaaaaaattaggccgggcgcggtggcttatgcccgtaattccagcactttgggaggcctaggcgggcggatcacctgaggtcaggagttcgcaaccagcctggccaacatagtgaaacctcgtctctactaaaaatacaaaaaattaggcaggcgtggtggcgcacgcctgtagtcctagctacatgagaggctgaggtgagaggatcatctgagcccggggtcgaggctgcagtgaaccgtgatcacgccactgcactccagcctgggtgacaaagtgagactctgtctaaaaaaataaaataaatgaggtaatgtatacgaatatgatgcacggagcggaccttcaacaattatttttattgctatgatctgcataattggcacaacagggccctgccacatcgaactgtttaagctcagaaccgtgtctgtcacatgtggagcgatccatgattgatgctatcattatcaccaccatcatcccaccaacccgcccatcggaaacaagctttcatcgaatcccatcgttttttccttttttgtaaatctctttcctcggcctggctctgccgcccaagtatgctcgtcaggcctttgcccacctggaccgggcgcgggcagcccggggctgaggattctcgagccttggtggaccacaggctcccgtcgccccgcccaagggcctggaccgcctgtggtctccatggaaacccgccagccacagggggcgtgacgccgttgagacagacagagatattcacctatcagatcaaagttatctgggcagggcgaacaaacgggacctccgagtggtacgtccttaaggcggggcgggaatacggcaacgggccgcgggggctgttactgtcgctaccaatcaagagtcgagatggctttgatggacaggcatagcgcgagtgcgggctttcgcccaaccggcgggccgctgtcccgaaaaaggaccaatgaggaggcggcaggggtggggcgaaggggccggttgctccggaagtggagggagggggtgaaaatggcgcccagctcgaaatcggagcggaacagcggggctgggagcggcggcggcggccccgggggagccggagggaagcgggcagcagggcggcggcgggagcacgtcctcaagcagctggagcgggtcaaggtgaggcctggagccggagtggggagcgcgccggagggtggggagtagggacgagggaggcggagggaggagggcgttcgcggggtgaggggttgggggcggggccccaggggagggggctcggatgcagggcctgggcggggcccgggggagatggcttggatggagggggctcagttgggggcctggatgcaggtggttgtgtcgggtgaccggcaaaggggctgggatggagggggttgggggcggggccccagggagggggctcggagggaggcgaccccagaggccgcagggagaatcaggaggaagggggcgatccaggcttttcaaagctctgctcccatggttgctccataatggaaccttcccgccccctttgcagagcccctgccgctggctttgggcttcctccgcctgatgttcctctccctgcccaagccccgaccacacatgagctgggagttccagtacctgggtgggcctccccattgaaagtgtgggagctccctggatagggctgagtcttcccccgcagagtgagagttaccgaagcaggctctgtctcctccatcagactggaaactcccagagctgggggatgatgtctctctcccccatcagtttgggagctctggagggcagaaatgtggatctcttgcaggtgggcagtaactggggcaaggctgtgtctctgtggacagggactgcgccttctccgtgaggctggtagctttgtaagggcagtgctgtgtctcccccttttgactgggagctccctgggctgggacagtctccgcccttagcctgggagctccctgggcttggctgtggttccgcccttagcttggaagctccttgggcagggactgtgtctcccctgtcggcctgggcctggctggccaggctgtttcctccgtcagactgagacctccatgtggacagggctgtctcccatcagacagggagcttcccagacaggactcttcccatcagattggaatgtcttgaaggcagagttgggtagcaagactgaggctgttcggatatccctgtgcctggcttctgcctgtcagtccccgcagatccttccgcggtgaagttttggggatgagggattcccttggattccgttggaaggcggtagttaattgggaagggggcgttgggtcattggttaggctcacccttctatctgcctcgactggcccccagcagaggccagagctgccccggggaggaggagcccccttgtttgaaggctggtgggttgggaacagatgggtgcaggtcaggactctgtcccagcctccttagtaggataaatacccacagcttagggacagccttcagggagggaagcaggtggcccagcgtgggacagggtgattggggaactttcttgggggcggtgacgctgggctcagtcaagagggacctgaggctgaagaggtatggaactgggaaggtggcctgggtccctggtggagatgaaggctcaagcgcggtccatctggctttactgtccccatctgcctcagttgttcccaccttccagagcttggccttcttttgaccattatggtgggctgggccggtctggacccggtgagagccgctctgcctctctgccgtgggtgagggggctgggggctgcagatggtgcctgaagtgccctggccaccccttccccagatcagcggacagctctcccctcgcctcttccggaagctgcctccccgggtgtgcgtgtccctcaagaacattgtggatgaggacttcctctatgcagggtgaggctgggcccaggcaaagggggcaggtgggcgggagtggtgggctcgccctgacctggccgctgtgccccctccacccccacagacatatcttcctgggcttttccaaatgcggccgctacgtcctctcctacaccagcagcagtggggatgacgacttctccttctacatctaccatctgtactggtgggagttcaacgttcacagcaagctcaagctggtagggaggcttcaacaccaggctggcccttcagatggtgtggttcagcaggtcacagcaacctctgagcctcaggttccttgggtgtaaaatgatcatcatgtactcctggggtcatcatcaagattccatgtgttagatccaaccatatgaaattaccagggcctggcatggtagctcacacctgtaatcccagcactttgggaggccaaggcgggaggatcacttggtccgagtagttcaagaccaggctgggcaacatggcaaaaccctgtctctactaaaaataaaaaaaaattagctgggcatattggcgtgtgcctgtagtcagctcctctggaggctgaggcaggaggatcacctgagcccaagagtttgaggctgcagtgagccatgatcacaccattgcactccagcctgggcaacagagtgagaccctgtctctaaaacaaaacaaaacaaaacaaaacaaatgaaggctggccacagtggctcacgcctgtaatcccagcactttgggagcccgaggtgggtggatcacctgaggtcaggagttcaagaccagcctggccaacatggtgaaaccccatctctactaaaaatacaaaattagccgggcatggtggcacatgtctgtaatcccagctattccggaggctgaggcaggagaatcgcttagaacctgcgaggtggaggttgcagtgagccgagatcgaaccactgcactccagtctacagagcaagactctgtctcaaaaaagaaaaagaaattaccatttttatggttcaaaatgggtaaatagcagcaattccatttggttcaacacaccctatgaagctgtagaacatgttggctcaggccagttagctttattaggaccaggccaccctggctttagccttgacccttgactcctggaacccccccaggaggtgtgctgttacctcagcatacatgtgaactcagagagctgaacgggcttcagggtaggctgggcttggaaccagtgcctggcgcagtctcccccgggacattgttcccatcggctgcatcccaccctggcctggtctccccgactggtgaaaggagcctccacggctgtcctcaggcaaggtggaggggtgtggcgggtgctgttggggtgctcctacccgctcagccccagccctgatgagggactgcatcgtacagcttcgggggacctccgcagtttccctgacccggtgctgcccctgaacgtgcctcacaggtccggcaggttcggctattccaggacgaggagatctacagcgacctgtacctgaccgtatgcgagtggcccagcgacgcctccaaggtcatcgtcttcggcttcaagtgagaccaggcgcctgggggagccttggctggttggggcagggggtgtgcagtgggggccccccaggcgccgaccaggcagctgagggtatgctggcccccagcacccgctcggccaacgggatgctcatgaacatgatgatgatgagtgacgagaaccaccgtgacatctacgtcagcaccgtggccgtgccaccgccaggccgctgtgctgcttgccaggatgccagccgagcccacccaggtgagggggccgagggggcgagggcctcttcccccctcccccccttgctccgggccgagagtgagctgctgtggcgtgtgttgctacaggagacccgaatgcacagtgcctacggcatggcttcatgctgcacaccaagtaccaggtggtctaccccttccccaccttccagcccgccttccagctcaagaaggaccaggtggtgctgctcaacaccagctactccctggtggcctgcgccgtctccgtccactcggcaggtaggccctgcggtctcgtggccacccggcaacgcgtgaagcgggtcctctccctaccccaccacacagacaaggggccccaggcgtagagaggtgggagctacttccccaagtcacacagcctggttgtgggaatgctgcggtccaaatgtggccacgcccaccacagccctgcccacgggatctttccagtggctgagatgtcccaccatggctgcctccagcagccacttggaatgtggctcatgtgactgaggaactgagcttgtgatacttttttttccactggagtccagtggtgcgatcttggctcactgcaacctcccaggctcaagcaattctcctgcctcagcctcccgagaagctgggactacaggcctgtgccatcatacccagctaatttttgtgtttttagtagagatgggatttcaccatgttgatcaggttggtctcaaactcctgacctcaagtgatccactcaccttggcctcccaaagtgttgggatgacaggcgtgagccaccgcgtctggcctgtgatggatttaattgtagttgttttaagctgaaatagctacagttggctagctggacggggtagcgcccctttctcttaagaagagaaacgctaatgtgacatttcagggtgtggttagtgggcaggcacttggcattatatgtttgatatcggaaagatgccagtgagaatcacaagatgtcccttgacagtgacaaatgtcaggaggctggatcatgccaccggctggcagcaacaggagggagggggccccgggggccatttggcaacagaattgtgactatgactgacccagctgccctgtgcccgggtctctccctctggcagagtctcactgggtccgtatgtccaagactgctgagggggagttgggggccacctgaagaaccctccctggggattggggagcgacttaggaggtggcgaggggttgggggcatctgtggaacaccaatgaaggcccctgtgtgtgcatccatggagcatgtgtcagatgcgtgcacatgtgggtgaaacacaaggaatctataactggaaccacttaatataaattaaaaagacgatttaggccaggcacagtggctcatgcctgtaatcccagcactttgggaggctgaggcaggcggatcacatgagatcagggagttcaagaccagtgtggccaacacggtgaaaccccatctctagtaaaaatataagaattagctgggcatggtggcacatgcttataattccagctactcaggagactgagggaggcggaggttgcagtgagccgagattgtgccaatgtactccagcctgggagacagcaagactccatctccaaaaaaaaaagacgttttaattttgcaagaactcagatgcaaagacgtccattaaatcctcatggaaatggttgtccctggggcggtcggggaatgggcaggattaaatgtatataacgcagcccacaaataagccaggggccagggcactctgtccccagacatatctggggctttctgtcctcacccccaatctataccaggaagggtgaggcgctgtctcttgctgaggcttgaccacttggtttttggccatgaaccccccagcttgcgagggttgacgccgctctgcccttttggctgtgggtcctgttaggaacgaccacagcggactatcagctctgtaccagcccagggaaagggcgtggtcatcagtgggagctgccgacacagaggggtgctttcttccttggccattgtcaccttctgttccccgccctgttgtgggagggctgtcacggtggtggaggggagcccgtactcgatttttctcagatgtgaccttgggcatgtttatccctgagctgcattctgggggatgtggcccctctctaggggttgcttgtagggggcttggaggaaacctgggttggggcccagccacagggttgcttagtgaatatgttggggttctccatgtgttccccacattccttgggggagtcgtctctaggcaggcagagacagaggccctgattcgatgaagtgtgcccgcagtggtctggcttgtgtcaggaaggaccgagggctttgccttaggtcttccatatcagagaaacgccagtgaaaatcacaagatgtccctcgacagagtggcagatgttaggaggctggatgctactgtagtgaacactctacgctgtagagtgttgtctccctcagggcagggttctgtctgtctggttcactcctgtgtcctcagtgtggggcgctcagtagacagcttaagaaaggggtttgaatgaacgtctgcacgcatgaatgcgtggtgtgcatgcgcagaaaggtctttccccttttgggtgtttcaaactgatctcagcatagccaagtctcctagaagtgtctccttaaggtgggtttctgaaaacccctggggacactgagcgaggctgggagcaccccagactgacacttctccacccccatctcttcttaggtgacaggagtttctgccaaatcctgtatgaccacagcacctgccccctggcgcctgccagcccccctgagccccagagcccagagctgccccctgccctccccagcttctgccctgaggcggccccagcccgttcttctgggtctcctgagccctcgcccgccattgccaaagccaaggagtttgtggctgacatcttccgccgggccaaagaggccaagggcggggtccctgaggaagcccggcctgccctgtgcccaggaccctctggcagccgctgccgtgcgcactctgagcccctagccctgtgtggagagacggcaccccgggacagcccccctgcctcggaggcacctgcctccgagcctggctatgtcaactacaccaagctgtactatgtgctggagtccggagaggggacggagccggaggatggtgagcggggggcaggcatgtgacagggcctgggatggagaggccagcccagacggggcccctggcctccctccaccccacccccacttcctgcctccccagagttggaggacgacaagatctccctgcccttcgtggtgactgatcttcgtggccgcaacctgcggcccatgcgggagcggactgctgtccaggtgggtgtgggcagtgggcgggccaaggacagtcccggggagctgccggggggcagttggcaccgtcccctgcgcctacccactcacccgcagggccagtacctgacagtggagcagctcacactagacttcgaatatgttatcaatgaggtcatccgccacgacgctacctggggccatcagttctgttctttcagcgactatgacatcgtcattctggaggtgggcccagggcgggcagggtgggcccagggcctcctgtactctggggtcgccctcaacagttggcatcatccacccccacccccaggtctgcccagaaaccaaccaggtcctcatcaacattggcctgctgctcctggccttcccgtcccccactgaggagggccagctccggtgagcgcggggatcctgccctctctgtccactaggggggccactggcagacacttcacggtgggggtgtggggacgtgagaaggctctccctgtgccacaacctggctgggcccctccatagctgttccaaagacaaaaggccctcagggtagcctggggcctggttcaggagcccggctgtcccagcgtttgtcctatgtccctctccactgtagaccaaagacctatcacaccagcctcaaggtggcatgggacctcaacacagggatcttcgagacagtcagtgtaggcgacctgactgaggtcaaagggcagaccaggtgaggcagggctggggggcagggtcagggcgcggccaaggcgacgagagccactcaccccctggccccgcagcggcagtgtctggagctcctaccgcaagagctgcgtggacatggtcatgaagtggctggtgccggagagcagcggccgctacgtcaacaggatgaccaatgaggcgctgcacaaaggtggggctcggtgaccccgtgatggtcagggtcaccaggaacacttgtcctcacccaggagctgattcctgagcgctgatgaaatgggtgggaaggctggtgaggagagggcagcccaggccaggcccagctcagcagccctgaaagtgtggggcctgggagcctcccaccagtcatggcctggctggtcactcattcacgctacatttattgggtagctgcaggctagaggtggagggcaactcagcagggtccctgccttctggaaccttctgggccagaagcaagtcaggtggagggtgtggccgcagggccaggcaggcaggggctctatgctttgtctccacctgtccctgtagggtgctccctgaaggttctggcggacagcgagcgatatacgtggatcgtgctgtgagggccaggccgccccggacactgactccaactacctccgtggcctgggaccggcccccttcctggggtggcctcttcctggccggctggcccaccgactgatgaccggcactagtgttagcctgcggaacggggctgggcagggcagcctctgttggcctgagggtctggacgctttttatttatgcctatttaagttgggaaggggcagagagagggcgccccctgccccaccagcctgagtgccccgccttcaccccgagctgggcatgggcctggcccctcgtgcatttgcccttttctcggctacagctgtggacgttgccctcggggaggtcgaatggaccccattccccctgccctgcccgcccccagcctccccacccaggccggcaacctggccatccccattccgttcttcttcatgtaataaatgttttaatttctgaacctcattgaggtcctgtcactgcagcttggggcccagctggagcccccgccccaaggcccccaccaaggcccggcgagtcagcagtaggcaaatatcacagcggaatttattgttttaagaaagactacaaaaaggtagaaaacagctcggcacactagactaccacacgtgtggacactttcaccaccgggagagggagccccgtgggcacggggactgggcagggccgccccaaaagctatagcacgcggagcacacaaaatagtgatttttatacaataggtcagatttccatttttttttcctttttcttgccataaacatctatctcacaggctgaaaacactgagaaaactggaacagataaggccatgatggttggaaaaaaacccaacaagttaccaactccgctcgggcggcgctcacgaatcgcacaatagtcatggggtgggggtcgcacggcacggaggagaagcgtggtctccgggaagataggggcacagaaaaggttccattacaaaccagcggcggagggcgggggcgcgggggctggggtctgtgggcactccccggctccgcggctcgctgctctttggaagctggaggccgtgccccctgccgccctcctcacagccgggccgggcagtgcccccttcttgagcttgggggcaagggagggcccagcgctggagaagatgcgacacccacggctttaattgcacttaataccaagaaggggaagcagtggggttgctgggggtagggtgtcccggggctgctgctgacagtggggagtccccaggtgacgcccacctgcgccggcccggggctcagggctgggcccaggacaggctgtgcaaagccagcgagctgaataagttaacagtttcgcacgggagggggcctgcctgcctgccccctggggtggtgggaggacggggctggggagaagacgctggggcctgggaggggggcggccaaggggccgagctggatgccccgcggggcacctgggcacgcggcgggttccttaaggcacgtcttttgtgtcagagtttgcagctgcggctccgcccagcccactgattgtgccggccccataagggaggagggccccggtcttccctgtctcggagtccccctccctgccctggctgaggctggagcagtgaccacgaagccacagaagctttgagggaccctggcgtggaggggtggcgggggcgggtggggcggggaggccaagggcttagctggagggcagcgcctgcacgaagaggccgcgcgcgtcagtccgcgccagcttggccggcggctccagggtctccgggcccagcgcgggtgactcgccgccagccgccagtgagatgtcctgcggcagctcgtcctcgctctcctcctcctcttcttcctcctcgtctggaacacagggaccaagtccggctcggggcggggtggcaacgcccccgggctcctcctcctcccgagcccctccgttgtccgccacccccgggacccgcgccctgggtgggaacacgcctcgcctacctttgtcggggtccagggggttcagggaggtggccagattggcgaactggaggaagaagagaagaaaatgggtgagggtcccgccgcctggcgccccgcccgcgcccccagtggcccgcctcgcgcacctcgcccatgacggcgatgggggtctcgcccttggcctgggctacgcggtgctcgatcaggtagtacatgtactcgtcgtagagcagccggatgaggtggaaggaaccgaagctggcggcgctgcgcagggtcaggtcccggatcaccatggagctggggatggagacggagaggagaccgtcaggccccgtccggcccgaccccctctccccctccccgctgcgatgcgcccgggcctcgcgccagcccagtgactcaggctggatcccgcacagccttcccggcacatgagcccagggccccagcctgcccgcccagcctgcaggctcgggtcgtcgtagaagagcacctgagacccccagggacgcggggccttccctggtgccgcccggacccgatcccgccgcgcgcgcacctgtagaaggaccacttgaggaggaagagcttggcggccttggggaagccggcgctgccctggtagggcttgagcacctggctcaccacgccgtccagccaggccgcccactgctccagcgagttctgctgctgcagcgtcaccttgaagtcctgctccagccgctgcaccacgcggtcctcgcagcggcacacccacgaggcctgctcctggggcacagagggtgggcgggcgcccggggctcagccgccgtcacccccgcctggcccgccccgttaggctgcccctcattcgcccgccccgccccgccccgcgctcacctgcacgttggcgaagtccacgcggttgaggtcgctcagcatctggttgatctgtgcggtgttctgcagcacagcgcgcgccgcctgcgccaggtggttgagcgacgtgtagcgccgcagtgtctgcgcgaaggcgccagccgcggccacctgcgtgcagggattgaggggcttgctgcttccaaggaaccccagcccgccagccctggccccaccccgctgcaacctccctaagcctgtttcctttttcctaaaaaaggagggatgtgcctcgctacttttgttgggacacagaaggatcgggaccttcaaactttgggtgtccactcacaagcgccccccaaaattcaatttattgtgttctgaccagggcacaatattctttgaaatttatttatattttttaaaataactattgagacagggtctcgccatgttgcccagactggtctcgaacttctggcttcaagtgatcctcctgcctttgcctcccaaaatgttgggagtgagccaccgtgccaggaaaggccttttttttttttttaaaaacgaaagaacacaatagataatatggagggcactgcacagaaagggcaaacactgctttgataaacacgtttcattttctttttctgttttttgtttgacactgaatctctctctatccaggctagagtgcagtggcgcgatctcagctcactgcatcctccgcctcgtgggttcaagcgattctcgtgcctcagcctcctgggtagctgggatcataggtgcacaccaccacgccgggctaatttttgtatttttagtagagacaaggtttcaccatgttggccaggctggtcttgaactcctgacctcaagtgatccgcccgcctcgcctcccaaagtgctgggattacaggcatgagccactacgcccggcctcattttctttcgtaccctggaatctcagctctgggagaggacaggggttttgtccatcttgttcattgctgtgtactgagaaggaggttgtgtgaatacatgaatacatgagtctcgctgtttcttctgaagggtttgctcctggatctggcatctactgtctccaaaggccccagtccctgccctgtgcccagcggtggtttttttgtttgtttgtttttcccaaccacatcccatcaaattcctcacatctaagtagtcagcgaatgtgcatcttttgatgaaaaaggcaagtattatgtttccttatagatgttgttgcctttcttaaaaagttttatctgtttctgcacacctgaagcactttctagcaaggctgtctaaagggaactactgtacatttgcagttggtttttatttttgaaagatgctgtgttgagtacagtaacaccacaaagggggttgcatttcagaagtgggtgcctgaggacactggtttataaagacaatgcccagggtgctccccgaggcggagaaggtctccccttcctccacaggcatcatccctggaacaggcgtggggacaaattttaccgcccctggggagcagaggagacggaggcctaagccccagagataggagaaagggaccccctcacactctcaccttcacccgcagcatctcctcggggatgttgaccatggcgtgggtgagccagctctccaggctcttggcaaagttccggatcgcttgggtcaaggcacctgtgggcggtggcgggggtcggtcagggcagggcgggtgtatgtggggcaggggatgccgagcaggccgagcactcactggggatgggccgcagcacgtcgggaatgaggatttccaccaggccctggtacagcacgttgtcacagtgcttggtccattggagcacgggctcgaacttggagaggagcaccaggatggctttgggcagtcgcttctcggcctcgtcatgtctgcgggcacccaccccaccccgggtcactggggtactctatggtcctgcccccatcgtcagaagggaacaggtagcccctgtccctgacccagggtcactggggtactctgtggttctacccccagcatcagaaggcacaggtacccccttacccccactccagggtcagtggggcactctgtgtcttgcctccagtgccagaaggcacaggtataccttgtccccaacccagggtcactgggggcactctgtggccctgcccccagcgtcagaagggcacaggtacccccgtccccaggtaagtaccccctgcctcccaaagatccccagggtctggttggcacaggcccgaggggtgggacgggatcctatgccctaccctccatacaggggtcaaacagattccagaacctgccactccagggagaagatggtgccctgccccatgcctgggcttagtcaggcactccacccccgactgttgagtgtcgggtggctatacacactccacacagccaaggatatgtgtaccccacaaactgcaggggacaagcaggtgccccaaccctggccatcaaaatcacctgcgggtcatgccctcctcccccctctccctcccacagtcgccgggcagtactcacacagccagcggtggcgcctcactgggctggctgaggttgtacctccagaaggtcttccacagcgtctccaccagggtgaactgcaggttcaccatgacgtcgacaatggcctgtggcagaggcggatgctcagggaggctggggggcagcatggccctcccatgcccgtggctgcgtccccgtccacttgcctgcccacctggccaccctacctcacagtgttcccggtacaggacctggaaggctttgatgtccccgggcccgacgccctcaggcagcaccttgccctggaggtcgagctctgtgaagtcagggaggctccgagaggcatctagggggccggggggaaccgtgaggcccttcatcccccttgcctgcccaccctggggtcctactgacctgtccgtttcccatcagactggggtcccccatgtgccggtgagacaacgctaggtggggtgagcgcctggcccgggcccaggacgggcccaggagtgagggcccacactcctctggcagagaggacaggagggtcttgtgccagccctgcctgtctgctgagtaacagcactgcaccaaccctcaggacgtgggcctctgagtcccggctgcaacacagcacccacctggccggggaatgggtaggcacccagggcacagtcaggaccacaggacactgccctgagcctaagcaccccaggttggggctagccatggacagtcgccctagggatgcccctcgactctgctagaagtattgttccccaccctccaaatgggatgtcccggcctccagggcaggtggggaaatgagctcccacgtgctcaggatcaaggatgtgtggctggactgtgggttccaagggttgcttgtttacttagcatcctttggccctgttttcatggattgttgtttactttgtctttttttttttttaagagatggggtcttgctatgttgcccaggctggtctccaactcctggactcaagcaattcctcccacctcggcctcccaacgtgctgggattacacacgtgagccactgcacccggccttttttattttcctgagacagagtctcactcactgtgtcgcccaggctgcagtgcaatggcatgatcttgactcactgcaacctccgcctcctgagttcaagcaattctcctgcctcagcctcctgagtagctgggattacaggcacccgccaccacacccggctaattttggtatttttagtagagatggggattcaccatgttgactaggctggtctcgaactcttgacctcaagcgattcctccagcctcggcctcccaaagtgctgggattacagacatgaaccactgcaccaggccttacttttagaaacactgggtacacacctgccttcttggcgagtgagtggtcctagccctgtggacaccatggctgtgggatggctggatgggaaagcgagtgggcctcacaggactcatgagagaagaggacctgccgtcatatctccaaaaagtaaccatgtccaactgggtgggatttgaaatctcatgtatgccgggcatggtggctcatgcctgtaatcccagaactttgggaggccaaggtgggaggatcacttcaggtcaggagttcgagaccagcctagccaagatggtgaaaccccatctctcctaaagttactaaaattagccaggcatagtggcacgtgcctgtagttccagctactcaggaggctgaggcaggagaatcacttgaacccaggaggcggaggttgcagtgagctaggatggtgccactgcactccagcctggacgacagagaatctatctcaaaaaaataaacaaataaatacaaaaataaagaaaatctcaagtagcataaaggggattcactgggaagctcagaacccccgagaaatgctttgcattgaaagaaatgagaatctaccttgaagaaggattctagggacagaactgtcactgtggacggagactgtgatgtctcccccaccccctgctggttctcgggcatctctcaccaagccctccccagctcagaggctgcctgccgccatccagctttgggaaccgtctgcacggggcagggaggcggtggttggggaagcacgggccagggagctctcacccaaaaattgctggtactgctgcacctgggcgctgatgtccgacagccccgtgctcggctgctgccccaccgccacgccgttggtcatgccttccatcttctggatgggcttgagcctggagtagaatgggcaggtgggccggctgctgggggccggcctgtgtgcccttccccgcctgccctgccctgggtccggccctgccttcctacctctgcttctgcgagaagggctggccccgcatggccatgtgctgctggtcctccatcagccgcagcaggggtgagctggccttgatgcgcaggccatagtagtggtacttggagttgcccctgggagggaggtggaggggaagggctgggctgggggtctgccggctggccggccatggagcacctcacagcacacccgtctcctctctgttaggagaatggatagagagacgcctgccctgcagagacgggggtgctgcactgaggaggcacaggggctgtgggtgtcaggagagatccagcggtttgcccaagattatgcataaatgaatggctgaatggatgaatggctgaacgaggtgacgctgaagctgggaatgggaaccgagacgtgagcggaggtgagccatgggggttgcaaaggagaggaagagaggggcgggttcttgggatgccttcttgttccttcccgcatgaatttactgactcacagaccctgatgaagcactgactaggtacaaccccgcgtcatcgaggtacgagcactgcagacggaccagaacaactgaaataagtcatgtaaaaggcacgtgtgggccgggcacggtggggtcatgcctataatcctagcactttgggaggccaaggcaggtggatcacttgaggacaggagttcaagaccagcctggccaacatagcaaagccctgtctctactaaaattattttttaaaaattagctgggcgtggtggcacatgcttgtagtcccaagctactcaagaggctgaggcatgagaatggcttgaacccgtgaggcagaggttgcagtgagccgagattgagtcactgcactccagcctgggccacagagtgagactcttgtctccaaaaaaaaaaaaaagtcacgtgtgagcgtgctgaatgctaaagagaaaaataaagcagggttggggggtgtcgggcaggggagagggggaggctgcagttttagttgaggcagtcaggggacgtgcaagtaaggaggggtgagaagcacatgaggtggaaggcaccgccagtgcaaaggcctagagtgggagtgagcggggctgtcgaggagcctcgcagaggccggcgggactgggctggactggactgcctgagatgactcggagtgggggtgggccttggcatgcccaccaattccccagggactgctgggagtagacggatggccctacctggtgcccagacggcgggttcgcaggcccatgaagacggagcggatgagcttgccgaaggaggcggcgttgacgggctccagcttctgctcctggcagtgcagtaagtagtggcagtagagggtgctccgtggcagactcacgccctcagccgtctcatagttgtccaggagccactggacctggggtgggagggagatgggagagcaccagtcagaggcgcttccgtcatctctgagtgctggggctgagtgccccacatcgacttccagctgggatcctgacagccacgcccacataagttagcacatcctactgccatcctctccaagaactatgtcccacagaactctagaactgcactgtccaatacagttgccatgtatagctaaatacattaaaggccgggcacggctcacccctttagttccagcactttgggaggctaaggtaggaggatcacttgagcccaggctgggcaacatagggagaccctgtctctaccaacgaatttttaaaaaaattagctagtgtcgtggtgcacacctgcagtcccagctatttgggaggctgaggcaagaggatcccttcagctcagaagttcaaggctgcagtaggctatggtcaagccactatactccagcctggatacagtgagaccttgtctcaaaaaaaaaaaaaaaaaaaaaaaaaaaaaaaaaaaattagcaggacgtggtggctcatgcctgtaatcccagcactttgggaggccaaggcaggtgggtggatcatgagatcaggagactgagaccagcctggtcaatattgtgaaaccccgtctctactaaaaatacaaaaattagctgggagtggcggtgtgcgcctgtagtcccagctgcttgggaggctgagacaggagaatcatttgaacttgggaggcagaggttgcagggaggcagaggctgcagtgagccaagatcgcaccactgcactccaacctgtgcgacagagcaagattccttctaaaaaaaaaaaattatatgaatttatgcagaatgaaaaaaatcaaattttcaagccaggagtggtggctcacacctgtaatcccaacactttgggaggccgaggcgggcggatcacctgaagtcagaagttagagaccagcctggccaacatggtgaaaccctgtctctactaaaaatacaaaaattagccaggtgtggtggtgggcacctgtcatcccagctactcgagaggctgaggcacaaaaattgcttgaacctgggaggtgggaaggttacagtgaactgagattgcgccactgcactccagtctgggtgacaagagcaaaactccatctccaaaaaagaaaaaaaaagactagaatagactagaagccaggctacatcaggaccatgagggaccaccaggaccaccagcgctgacccaccccacaatcacacaaatgtcgaagggcccggttggggttggaatccagggctgccccagggacttcacacaaccacttctaggcacagggaggttccagcacccgccttcctgatggtggaagaaccctgttcaggaagctccccatggcagtgctggcttctctctgccctcattatctattctctataatcaattttaatcagaatagatggctgggaggatcgcctgaggccaggattttgagaccagcctaggcaacagagtgagatcctgtctctacaaaaaaaattttttaaaatccgccaggcgtggtggctcacgtctgtaatcccagcactttgggaggccgaggagggtggatcacgaggtcaggaaatcgagaccatcctggccaacatggtgaaaccccgtctctactaaaaatacaaaaattagctgagcgtggtggcacgcctatagtcccagctactcgggagactggggcaggagaatcacttgaacccgggaggcggaggtcgcagtgagccgagatcatgccactgcacttcagcctggcgacagagcaagactccgtcttaaacaaacaaaaaaattagccggacatggtgcggcatgcctgtagtcccagctacttgcaagggtaaactgggaggatcacttgagcctgggagtttgaggctgcagtgagctatgattacagcactgtgcttcagcctggacgacagaacaaaaccctgtctcaaaaaaaaaaaaaaaaaaaagtagacaacattttttttttttttttgagacagaatcttgctgtgtctcccaggcttgagtgcggtggcgcagtctccgctcactgcaaccacctcccaggttcaagcaagtctcatgcctcaccctcctgagtagctgggattacaggtgcataccaccatgcccggctaatttttgtatttttagtagagatggagtttcaccatgttggtcgggctggtcttgaactcctgacttcaggtgatccacccacttcagtctcccaaagtcctgggattacaggtgtgagccacagcgcccagccaacaatagacaacacttctgtagtattgtgttaagaatttcatgcatatcagctgaggcccagagaggctgagtaatttatctgaggccacacagcattcaatcccaggacatctgcatatgttctcttcattgggggccacacaggctcctgctagcggtggttggtaaccaccgtcatggactgggcttctagtgcccaccacccaccactgcctgcctcctctggggcccgcgttggggcacttaccgtggctggcgaggcacgggtggtgtgagagtaagactggctggcactgcccagcatgtagccgccttggatcacgtaggtgcctgctccgctgccgccgcctccggtgctgccactgccacccccgccaccgcctcccccgccgccgccgccaccaccactgccaccacctccgctgctgttgctggccccagccccagtgctggtggagctggcgacgacctggctgccggacacgtacatgggcatggagccactgctggccaccgcctgggaggtggcgggggtgctgacctgggtggccgtgcctgcggcctcgtagtagctggtgcttgccgtctgcgtgtacagcggcgtctcgggataggagtaggtgctggaacggctgggaaagaggcaaagccaagggagagtcagggggatgagaactggggggccgaggggcatgactgtgcaggaaggggggtcctaggaggggactggggaagcagcagctcccctgcagcaaggagcagatcctagcattcatctacaacggactgggtaccatcctgagtgcttgatgggcagtatttcatataatcatcagctgggcatggtggctcctgcctgtaattccagcactttgggaagcagaggcaggaggatcgttgaaggccaggagttcaagactagcctgggccacatagtgaaaacccatctctacaaaaaatatgaagattagccaggcatgctggtgcacacctgcaatcccagctacttgggaggctgaggcaggaagatcccttgagtccaggagttcaaggttgtagtgagctataaccatactaccactgcagcaaagcctaggtgacagtgagactctggctttttatttttgttattttatttatttatttacttattgagacagagtcttgctctgtcacccaggctagagtgcagtgtcgcaatcttggctcactgcaacctccgcctcctgggttcaagctatcctcctgcctcagcctcccaaggagctgggaatacagggctcaccaccacaccaggttaatttttgtatttttttagtacagttggtgttccaccatgttggccaggctggtctcgaacttctgacctcaagtgatccacccgcctcagtctcccacagtcctgggattacaggcatgagccaccacacctggccgaccctgtctttttaattaaaaaaaaaaaaaaataccgaagggttagggaacttggaatgctacacacttcattaaaaaaataaaattggcaagtacttcgagtgcctactgtgtgctaggcactgtttcacacactttggacacagcaatggacaagaatgaaaagccccggcccccggaaccgtctagttggggagacaggcaagaagccacgtgcaaaggtaaatgagagatcataacagaaggtgatcaggcagtgagtgaagcaggaagggggtggggctagagaaggcgatgctgtgattggaagggactagagaaggcgacgctgtgattggagaagaccatcaggaatgcagatatgtttcccctgagccaagctacctatcccaggctggggaagcctctctccttcagatatcgcgtgacgggatgggcaccggtgacacaggcttgaggctgcaaatcgtcacaagtatacaagtataaaaaccaccaggggttcaacctcaaggggctgttaaacaaaagatgatggaatcctatgcaggggtgaaagagaaggaggcaaggcttgtcgtcccccgaaagaacaagctccagaacctaacaccgggcagataagaggcagagaagagtggggaccgtgtgaccgaacaatagggaagaatgcgttgcatgtggcatgcgtgtctgtcatctgtgggcatggagggctccgtcgagggggacaggcagggggcacctctcaccatctcgctaaacatcgttggacatagttttgatctttgaactctttcaatgtactagtgattaaaaacatagcattaggccaggtgcagtgtaatcacacctgtaatcccagcactttgggaggacgaggcgggtggatcacttgaggtcaggagttcgagaccagcctggccaacatagtgaaaccgtctctactaaaaatacaaaaattagccaggcatggtggcaggcgcctgtagtcccagctactcaggaggctggggcaggaggatcacttgaacctgggaggtggaggctgtagtgagctgagatcatgccactgcactccagcctgggtgacagagtgaaactccacctcaaaaaaaaaaaaaaaaagggaggggggcaggggcaggcacggtggctcacacctgtaaccccagcactctgggaggccaaggcgggtggatcacctgaggtcaggagttcaagaccagcctggccaacatgatgaaaccctctctctactgaaaatacaaaaagttagccgggtgtggtggtgggcgcctgtaatcccaactactcgggagactgaggcaggagaatcgcaggagaaccaccctgaaggtggaggttgcagtgagccaagattgcaccattgcactccagctgtgcaacaagagggaaactctatctcaaaaaaaaaaaaaaaaattaaacatccagaaagacagtgtggtcagtcaagaggtggcctggctcagactctgaaggtggcaggggagggagccgcacaggcccgagtggttgtgggtgaacaaagagagggagttgagggggacagtggaaggagatatggaagcatggtctttgtcacacatcaggtccagctctcgatctctctgtcctgccctatgtctaccacacaaagtgacaccaagagcacatgacctgagcaagagcccctacttctccaaggcgggggccacagcctgctcactcctgcacacccagcatgcaatgtgtgctgcaaaaaggttgctttggtagatggttgctgaatgactgaataaatgaatgtgtgcagctctggatgccccccagaacaggaccagggatggaggcccaggggctgtggctttggccagggtggggatagggctggcaaagggtcgggaactcgcagtaattcactcagagggagagacagaaggggtgggcagctgacagcaggagtggcccccaacaacttctcgtagcagaaaaacccgatagcaacgatgaactaggtgcaatcacacacactatgatcactgagagaggaattcagacagaagcaaaggagagacaggagagacgctaccagggatggcagcaggaacccttggacaccgtgttcctctttgcaatgccctgtctggcccctgccagcttggctcaaccacacagtgaaaagattagcagcactggaaagaaacaaatggaactgtgaggtagccggacgccggggaccaagcctcacgatttagatgcctggaccaggcccactggggtcggtcagagcatcatgaccctaggactaagtcgatccatgagctaaccaatcccagcattgtccccagaagaacaagtggcagggatgaaaaaagaaatcatgcaaatgcaaagaaaaccaagtgaaacctctggaaactaaaccaacagtaactctagtactgcagcaatttctgtggagatgggagagggaaggtggcatggaggacccccggcgaggagcccgagccgggactgaagcggggccaggacgtggcccctgcctgacacggcccatacacaggaatggtagtgctgtacccagggaggggaagaagccccctatgcatcactgggtggggactgatgacatcgtggctgctgcatctgcacaggggttattacacagcagctaagagggtgaccaggacccacgaggacacatggtagaagagccaggaaagaaataaggtatggatggaatgtcctgcgtctatttctgaccacagaaagcgggtagaggctgggcactgtggctcatgcctgtaatcccagcactttcggaggccaagacgggaggatcatttaagtccaagagttcgaggagatgagcctgggcaacgtggcaaaaccccatctctacaaaaatacaaaaattagctgagcatggtggtgcacacctgtagtcccagctactagggaggctgaggtaagaggattgcttgagcccgtgagctgcagtgagccctgatcgcgccactgctctctggcctgggcgacagagtgagaccctgtctcaaaaaaaacagaaaaaaaaagtccagtgcggtggctcatgcctgtaatcccagcactttgggaggctgagacgggtggatcacgaggtcaggaattgaagaccagcctgaccaacatggtgataccccatctctactaacaacacaaaaattagctgggtgtggtggtgtgtgcctgtaatcccagctacccgggaggctgagacacgagaatcacttgaacacaggaggcagaggttgcagtgagccgagatcacaccactgcactccagcctggcgatagagcaagactccatctcaaaaaaaaaaacaaaaaaaaagaaaaaaatggatagagggctagagtttctgttcttagagtatctctggaaagaaacaaagaaacaggtcacagcatcctctctgggacagggttgagagtcaaatgattttttttttttgagatggagtgtcactctattgcccaggctagagtacagtggcacgatctcagctcactgcaacctccgcctcctgggttcaatcaattcttctgcctcagcctcccgagtagctggaattacaggtgcctgccaccactcctggctaacttttgtatttttagtagagacagggtttcaccatgttggccaggctagtcttgaactcctgacctcaagtgatctgcccgcttaggcctcccaaagtgctgggattacaggcgtgagccaccgtgcctggccttttttttttttttttggttaaaaaccaggctcatttgactcccaagccctaagctatgccggggtgcctttcccaaccttcaagggtccctctgcttcgccacttttcgtggctgtggctgcccctggggagtgcccacctgtgtgtctgtcacctgaggccttgaaggccggatggcctgctgggggctgggactggggactggtgtcctgggagactggggaggctccagtgcagacctgactccctcacccacccctctcccttcacttacatggcactggccgtgtagctggcatcgccgccctccacatactgcacctggctggagtacacgtgtgggacgggcacctgctggagctgctgcacctggggcagaggaagggcacgtggagggtcaggggtgggccagctcctacggttctccctctaaagggctggtgcccacccaggctatccctgacgcccagctcccggacccaagggtggcttctggactctcaacaaaacaccctggaggaggccagggctgggaatcaggaagagctgtgtcaggagaagccaggactctcggcttcggctggggccagcaagggtggggcctgacggacagtggaggggacccgagacagggtcctgtagtgggcgtgaaggttggaccccaggcacaggggcaaggctatcgctggagccatggagctacagaaagggcctcaggggtggggcctggaaaccgggcacaggatgtgaggggcggagcctggggccccggttggtgggacagaacctggaatcactgacagggccttaggggcggggcctgagtcccccacctccatcccccacccttgtctgcaggggcggagctgggacctggacggggcttgggtggggagtcagaggcgggtccctagaccgacccgtcgggcggaggtggggtctacagggcttgcggggcctggtgggcggcccagactgggcgcccccgcccccgcccgcccgctgccccccgcccgtgcgtccgccacctactttgagggccgtggcggccgtgccgaacactagcacctgggggattctctggatcctgaccctctggtcggggctggctcgggccgggagccgggacagtggctcgaagaccactttctgctgcggcaggagcaggtgtgggggcagcacgcccaccagctccacccactgctcggcgcccggctcgtaatggggcggcggcggctcggggctgcctagctgcggggcctcgccgctgcacgcgggcggccggggcggcggctccggcggcggcgtgggccggggatctcgctgctctgccttcctagcgggaaactgactgcctgagctctggaggacaaacagagacactggggggtcaacgggggcggccgcgggcggggctccaggcctccacccaccgggttgctgagcgcgcacgcagccacccgagggaagatccccgccgcccggggtctcggagaggggttagaactgacccagggccacgcaagaaagaagaggggtttgaatccagatctctcttagcaaaacctggaccctgagctgccagggggccgggaaaggggaaggatgtagggcagtgtctgcagctcacagaggcatttccctccctgcggcctcaggggcctgcactccccagccccagcccgggaccagcccctttgcccgtggggtaggagggggagacacacacctcttgagccacgtggactggctggaggccctgcacggtcagcggctgcaccgggccgggtttgggcgcttgtggagtggcctggaccacagatctctgggaggggaaaggcaacaataagatgaccatggcaacgatggccgtcaacctacccagcccctgcacaggtgagcttctgtaaagctcacagcagacccataagcaagaggccaccattctccagccaagcaaggagggtgctggatccattactgataaagtgaggctcccaggaagcagcagggctgagttgaacctgggactaacttcggggtctctgctctccgccccctctccctacgggcccctgaagctgtgccaagaacccgcaggcaaggccttgggttatctttcgtccccacaccccccaatgtcaactgtgtgccctgttctgtgctgtggcgggcatgcggggattatcctaggggcgcagagccagggacggaggctggcggaggagggtgctgagtggaggagctggggcctggacctaggtctggaggttcgggggggctctagtgccaggcgggggagtatctgtgaaacctctgggacagggtttctgtttacacttggggaagggtctatggatttcatctgttttttcaaggggcttggaaccccctcaacttcagtggtaacaaccagatggtgcgcagccccagcatcttaacctgcgccggctcagggctctgcctcctgcagaggctgggtgtggatttgggggctgggtcccctccctgaaatcctccccagaaggagccaggatgtggcctcggggcttccttcaggcaaatgggcccaaagaggctcaggtggcttctccaagcggttcccatggcccactacgccccagtctccttccaggaggttcaaatttcgtcctccccgcggctcccccatcctctagccccaggatgctgagtctggagacaggcagagatgcttatcaaaggccagggtggcaggctggggctggacccacatgggctgggctctaataggccagaggcacagccgtggggggctgcagaggctgcctggccggtacccctggaccgagccactgcccgccttggcctggcacctcttgggtgacggggacactctgctggacgccgtggacctgcagctgctgtggcactgtgcccgtgggggccccggctgtcttgctggaagagctgttggcctgcaccggcgactgctgtaagggaaggagacacaggagtgccgctggggtgggcttgcatcctctctgaggtgggctcacacacacacccttctcaggagagctgtctggggagggcggcagtctgtggggacctatcccaaccaccgaggctggtaactgaccgcgtcccacgcatccaaatgcctactccctgcaacagtcccagtcaactcccagcaatgatgggggtttaaccctccccagcaaggttggctgatggtgggtggtgccgccagcacccctgaagctctcctggggctgaccctcaaaggttatagcaatgacgacagcagcctctggtgtgatattgggccgactcccaccagacactgcactgagcgctttaaatgtactcactggaatctcatggcacccccacttcccaatggaggggcagaggggaagggacaagccctgggtcacatggctgcaggcgatgaggcacagggctgagcccaggcaggctggccatagagccccatgtctgctctgagccctactgtgcctcaggctgtaattcccacagcaagctgaggggtggttgataccatcagttgtttgacacagagaaaactcagggctcagaaggctcaaaggggccgggcatggtggctcacgcctgtaatcccagcactttggaaggctgaggtgggcagatcacctgaggtcaggagttcaagaccagcctggccaacatggtgaaaccccatctctactaaaaatacaaaaattagcagggcgtggtggcgcatgtctctaatcccagctactcgggaggctgagacaggagaatcgcttgaacccaggagtcggaggttgcagtgagctgagatcgcaccacttcactccagcctgggggacagagcgagattctgtctcaaaaacaaaacaaaacaaggctcagaggcctgcctagagtcccacgagaggaagtggctgggccagccatctgaccccgagctcctgatgcagacagcatccacagcctgtcttcaacaccctcattggtgttgtgggtccccagaatctaccctgtggtccaaggcttcctggaagagactgtcccaccctccggggggaagaggaacccactttgtttctcggaatgcagttccctgagctggagctgccaggaccatctcaacccaggaaatcacctccttctcccagagcagagctccacggccgcttagctcagagctggcagggccaggaattgggcagctaagccaccctacctggggtcaacaagggcgttgcactgggagtgaagagggaagcaggactttggaggagcaagtgggcttggggggcggggcagggagccccaaatatactatggggatacattgctgacctcgggagacagcaggggggagggcggccaacaggaccaccacttacctctgggggcgagtgcacctgctgggtaccatggaccgtcagggagacctggccacctttgctgcctggggctgcgctctgcaccaccagacgctgcgtgggaagagcctggggccagggagggagagggagggcagatcactgatgacagcccgtgcagttgcaccgagcatctgcgcagtgccaggtgacattctaagtgcttcacgcctgttagctcacagaatcgccctgacagccctgatgaagctcggctactgcccccacttcacagagggtgacaccaaggctcaggacggcaaaggcacttatctgaggtcctaaagccaggaagcggcagagccggagttgttgtcaggccatgtggaatgtgctgtcatccttaaaacccaatagtcctaggctgggtgtggtggctcacacctgtaatcccagcactttgggagactgaggcgggcagatcacctgaggtcaggagttcgagaccagcctggccgacatggtgaaatcttgtttctactaataatacaaaaattagccaggtgtggtggtgcacacctgtagtctcagctactcaggaggctgaggcaggagaatcacttgaccctgggaggcggaggttgcagtgagccgagatcgagccattgtaaaacccaacagtactttgtccagatctgcgctgatcagtcggaaacgggtgtgcgcggcacctcatgcgcagccttctgggggacagaccaccctgtgctggctgtggactcctgactctaaacctggccttgggttctctgcttcgggacactgggttggacccgcaaaccaccttcccaactatacatcttgttctctctgctgagatggctcctgcagctcctctgtccctgatggcccctgccggatagtctcaccctggggaggtgactgcccagagccaggaggtagggcagcccctggatggggactcttccctccatcctggtgaggacagatccaggcttgccacagggggttggtcctccaccctgagggagccttccagggtggtggccaggtgcagcagcattacctgctggggcacttggatgttggtcagctggaggggcgacacgtggcctggcttggcctgcacgctcgtctggaccagcagccgctgtggagacaaggcaggaggagctgagctgccacttcccccagggaggcctggcgtggttgggtggcgggcggctgctgtgcacatcttgataagaacaggtgagcagatggctccagcaggaagcggggaggggaggtgaggcccccgaggacgcagcctgcactgcccccctcccgggccctcccccaccccctgggagggccacatcctacctgctgggtgccctgcacctgctgaaccacctgagtaggaacgccggtctggctggcggtggagccggggctggcctccgacactgtctcgctggcccgcatggcaccttctgtggggaggggccaccaggtcagttcttcctgctttccctgcccccagcctaagcctgagcccccctggaggggaagatgcagcctgaagccaacccccagcaaggtcaggcccctccaagagtcctgcttccccctggccagccctgactgcacccatcaggggcccacgtggcagagcgggctgaggcttgcaggacccaggatccttaatacctggcagcagccctcatcagctttcctcatcctgaagtcagaccagatagggtgactgaagagctatgatgctcaaaacccagaaggctggacccttcccagcagacgggacttgtggacaggcagggaactgactgtccactccagggtcctggcagcgctggaaggatcgaggtgctggggccaccttctctggggtgaccctggcttcccgggagtggaagctgctcggaggagtggtccctggaaggtcttgctagcctgtggccaagtcctccctccctgcccctctgtcctcagtggggtggggaccacaaggggcttggagtgggggaggcaggtactcacgctgacaggcagctgagaagagacaatcatagaacatggtgctcatcccctcccccaccccacccgccccccaccccgtccgcctgtccgtccaggggggcctgcctggccctctttgctccttgcctgcctctatagaacagcagggtgtgcaggtggctttatacccacgaccttggggcgctaatccccccggtggatgcagagagcctgcctgccctcttggaaaaacactcccctccccagcaaagcggggccttcgcggggctggggcagcgctgcggggtgaggagggaggttggtacccggagatgctatcaggcaggcacaggtcaaatttcatgcacatcttgctgagtgattagcaggggtgctgggggtagaggcgagtgttcccaagaggcgctggctagaagaccctcaccccagctgggacaccatccatcccatcccctccatgtgacctggcatacccccagcagctccagaggccgaggtggggctgggggtggacatgtacctgcccttcctccaccatcaaggagccaaggtcccaggcccacctttcttggggatttagaggggtttatccgacccccggcaggactgaagggccacgggcaaggagttatcactgcagacactagtgttgcttctggcacactaggtgttatgttagactctggacagccagagatagagcttttttgtttttttgagacagggtttcgctctgtcacccaggctggagtgcagtagcacgatcttggctcactgcaacctctgtcccctggggttcaagcaattatcctgcctcagcctcccaagtagctgggactacacgcatgcaccaccatgtccggctaatttttgtatttttaatagggactggggtcttgctatattgcccaggctggtctcgaactcttggactcaagcaatccacctgcttccatctcccgaagtgccggaattaccggcgtgagccactgtgcctggctgacagtaagagctttccgggatttttttttttttttgagacagggtctcacagttgcccaggctggagtgcagtggcgcaatctctgctcactgaaatctccgcctcccggttcaagtgattctcctgcctcaacccactgagtagctaggactgcaggcacccgccaccacgcccagctaatttttgtggttttagtagagacggggttttgccatgttggccaggctgctcttgaactcctggcttcaagtgatccgcccgcctcggtctctcaaagtgctgggattacaggcatgagccactgcacctggctgacagtaagagcttttattacccattttcagacaaggcaacagagaccagaagcaaggaagtgatctgtccaaggtcaaatgcaccatccaccgtgcaggccatgacgcaggttcccctctgggcccacacgaacctcataccacatatggaaccggagtcactggttctgcctgggctgcgccccaagggcagtgatgtgtgaacttgggtatatgggcacaggaaggaaagtaagctgggggtctacggggacccctcaaagtctgaagtatccagactgggtctcggctgtccaggcagggcacaggagggagaggggcctggacagggcaggagggctattcagggcagatgcaaaggccaagtcaagggcagagcgcaggagtgtgtgttgggggcgggggttgccagatgtgggaggtgttgggggaggcctccgcgtagccgcatgtgggctgtggggcatttggtcaatcccatgcctgcctgaccagctacctgtgcagccaattccacaggccctaatccctgtgttttgctggaatcttccctggcatctgctttaggcttcccagccctgagccataagggaggaggcccttgctgagagggcccctcctgggagaaacccgagacagccccgagtcatgtgaccggcactgcacacctgggtccgtggggtccaaggactcaggcccagcctaagggatggtgtctcacccaggaagctcaaggtgggcagggagtggggggctggccccccaccctctccagggctcaggggctggtcgctgagcaggacctacagcaggaggaggcctggggacctgctgagaccaggtggctgtctccaggaagcagccttgcccgtctcctgcctctggggtagccctcaaggctgggaccccgcctgccagcccaggagggcgccaggggatgcgccacgaggctaacaggtgagcctgagtgactcatgcggatgagggcttcctgtgcagccatccctgtctgcctgcggccggggcagggcccctccaccactgggtctggccctcgctgtgtttcagggaggagaagccaggaggggaagtggggggtggcactgagtctgcgagcgagcgtctgcatctatctgccggagatcgccactctgggcatgcgcaggaggccagggaggcccccactgtctcaggaaacggcggccgatttcctgtctctgaatctgacacattaacatctctgagcagtggaatgactctgacaagtgggcacccatcctccccgggccccgcacttccccatctagacctactcaaaccttaaatgagctacttgggggagcccaggggaggccctagaggctggactcctggcatccaccctgggggcctggcccccttccccatagacagatggggccacctgaccctctgcctcctgcccctgggctccctgggatgatgtcagtcaggggctcctggaggggcccctgctgcccccagtgtcctctatcccttgtctgctccaacctcagtttccccatctgtgcttgggaatgctgacaaacacactccacttctctgtctggacacaagtcttcttggcccccctagaactccaagtgagagagaagcagggaagaagggccggactcggcccctccttcggggcggcccctgttccctgcaggccggctcggtttcaccttcccaggagtggctgccagagcccacagcactctccttccgccttgggttctgggagagtctgatggcctctgaggacagggatttatggatctagtattgttcctgaccagggaaacttgatcttccttcctaccacctccaaagtcacctttaggcagggcaggcagggaccggggctgggtgagctgtgtctggtttggtgtcggctggtgtccagccccaggctccaagtctgggtccaggcccctcccttcctcttccctgccacctccctgggtccctggtcagctccgattgctcctggcttgggagaagtcctaggtgccttgtggcagccttcactggtgtcagttactcctgcttccccggcgctcacgtggccccggccacccttagatgaggaaggacgctaacctggcagagggtcagggaggaaggctggggagttactgcaaggggtgggggaggggacagctggcagggcacaagccaacctcctcttcctcagaacaaatccaggaagcattgcccagtgacccttctggggacaggctggcacctgccagaatgtggagtggcagggaaatgaaattccctgggaccactgtgaaaggcgactaagctaccgcctgaccaaagtgagccccagagagttctgtggacagcagggttgctacagcctgccctcatgggtacagagtaccctcctgggaacactaccaagatgggggagacagaggccacctccccatgcctaacagctacttagagtccggcctagctctgtctgacccaaagaccatgccttgctcttgacttgctcttgacttcttgctcttttttttttttttttttttgagacagagtcttgctctgttactcaggctggagcgcaatgacatgatctcgactcactgcaacctccacctcccaggttcgagcgattctcctgccccagcctccccagtagctggtgctacaggcacacgccaacacgccgggctaatttttgtatttttattagagacggggtttcatcatgttggccaggctggtcttgaactcctgacctcaggtgatccgcctgcctcagcctcccaaagtgcggggacttggtcttgactttgaagcaccagggcccccctgagggagtgcgggaagagctggagaagccaaggtcaagagtggaaggacttggggagtggtggagcctggagctgtgtgcccactccagaccctggctctagggagcctggaccctgaagcaggtaagacccacacccagggcgtggatcaggacccatcagacactctgggcgccaagcagagccatccactggtgacatgcgaggcctcctgcaaacagtcagccatgcaggagctgatgggacatgatggctgtgctaggtgctcctctaggctgttctgggtcaggctggtgctcctcagtcattccacagagactgagcactgacagagccctgcctgcaggtgggcacccccaccatcccattattgtaacttcaagtagtgttaagtgttaagaagaccagcggggcgcagtggctcacacctataatcccagcactttgggaggccgaggcaggcagattacttgaggtaagaagtttgagaccagcctggccaacatggcaaaacgccatctctaccaaaaaatacaaaaattaccctggtgtggtggtgcgcccctgtaatcccagctactcgggaggctgaggcaggagaatcgcttgaacccaggaggcagaggttgcagtgaactgagatcgcaccactgcatccggcctgggtgacacagcgagactttgtctcaaaaacaaacaaacaagaagacagagagtgagcaatgggggtaggggcagggaggtgtggagtcagaaaggtagtgtctgagcagcgacctaagggagacaagaggcaagctcccagagggtctggggcagggagtgctcctggcagagggtaccgagagtgcaaaggtcaggaggcaggactgagcctggcgggtttgtggagctgtaggaaggcaagaggggctggaccaggtatgtgaggggatgggtggaagtgggcgaggctgggaggctggcaggccagagttgaaggggcttgacatttgctagtaggggcacagggtgtgtggagcatttttgcattttgtttttgtttttttgtttttgagacggagtttcactcttgttgcccaggctggagtgcaatggtgcagtcttggctcactgcaacctccacctcctgggttcaagcgattctcctgcctcagcctcccaagtagctgggattacggcgcccaccaccacacccagcttagagagagagagagagagacagacagacagacagacagacagacagagagaaagagagtgtgtgtctgtgtgtgtagcttttaaagtccttttttgtcaggtatcgggggaggggaaggagcctgctctcccagagctgagaaagcctaggctggggtttctcaaagagtgcccatggaaccacctggcttggagccatcagggttgagctaggatgtgacgggacctaatggacagttgtgaacctgctccctctggctgctgggaggggtcagactgtgagggcggaggctcgaccaggattggggtcatagaagtggaagaggcggggggggttctggaagagtttaggaggtggagccgagaggtcttactcaaggaggagtaggacagaaacaagactgaccgtgggcctgggaggatgagaaagccttgaaggagagatttgaagagggaaaaatgcagaattcaatgtggctgcactggcctgcatcaaattcaacaccaagtggatgagtcaggaggggctggatgtggggtcctgcggttcagggttgcagcccaggctggagacctcagtgtgggtaatgagagctgggacacaggatgaggccatcgttaagggagaactacaggagctaagagaggttcccaggtctgagtctggggctccccgtcctttgctgacaaggtcagggagatggggagaagcagcagagaggaccacggaggggctgcgggcggtgggcggagaccagggcagtgtgggctcctggaggcctcacaagaggggatctttgggaaaaagggggccagctgcagggggtccagcagctggaggttcctggagaaaatgggggcttggctgggcgcggtggctcacacttgtaattccagcactttgggaggctgaagtgggagaattgtttgaggccaggagttcaagaccagcctgggcaacatagtgagactctgtctctacaaaaaaattaaaagattaggccgggcgcggtggctcacgcctgtaatcccagcacttttggaggccgaggcgggtggatcacgaggtcaggagatcaagaccatcctggctaacacagtgaaaccccgtctctactaaaaatacaaaaaattagccaggcatggtggcgggcacctatagtcccagctacttgggaggctgaggcaggagaatggtgtgaaccccggaggcagagcttgcagtgagccgagatcctgccactgcactccagcctgggtgtcagagcgagactttgtctcaaagaaaaaaaaaaaaattacctgggtgtggtggcacatgcctatagtcccagctacttgggaggctgtgagagtatcactgagcccaggagttggaggttacagtgagccatgattgcaccattgcactccagcctgggcgacagagcaagaccctgtctcaaaaaataaatacataaaaaataaacaaaatgggtgctgttccaccttgatgggtggatgggaagatctgcaagagggggattaagtgatgcagaaggaactagaaggagcaatggcaggagcgtgttctggatatgggtggtgctgcttaatccaagaaggcaaaggtggtgggtgcagatgcaccccaggagctgggcaggagaaggggtccctgtggctgcctgatggtactctgtccccagtaaggttgcctgcagggtcagggaccaggatcatagtataagacaaaggtgatggaggtgaaggtggggcagagggagaatgggtttcttggagcatgaagttcactgttaaggaaatgctgcaggatttctgaggggtgctgagaacccaccagaggtttgtggcctgaagaccctgcccatgactgcagcccgacctcaaccagggcagggctgtgtctacacaggcgggggggcactaagtgtggcgctcatgcggacacctccactccgtccatatagtaaagagtcactgccctgagtccctgcatgttcccgccccaaacctctgccagagaccctggacctcccacgcagacactgccagaagcctctgggacactgcccagggctccagccccatctgctttgttccacaacggggccaattgctacacttttcattactttttttttgagatggattctcgctccgttacccaggctggagcgcagtggcacgatctcagctcactgcaacctctgcctccgggttcaagtgatttttcctgcctcagcttcctgagtagctggcattacaggttcgcgccaccacgcccagctaatttttatatttttagtatagatggggtctcaccatgttggccaggctggtctcgaactcctgacctcaagtgatccacctgcctcggcctcccaaagtgctggggttataggtgtgagccaccacacccggccaattgctacatgttttgatgactctttatgacctgatggtccccaatcccatcttgacccaccccttccacagcccctcaggatgccctgatgatctcaccccttccattcccactctgagaaggaccagggccagctttgatccgggctcccactgaggcctccgtccaccacagagcacattaaaaacacactagctgtgcacagtggcaggcgcctgtagtcccagctacctacaaggctgaggcaggagaatcacttgagcccaggagttcgaggtcagtctggacagcatagcaagaccccatctctaaaccaaaaaaacacacgaatctagcctaatgcccaggctgtgctgccattcccaccagagcactgagtcagtcgagacagagacccagccctcaggcagaccctaaaccagtcaaaacatcgtcactatgtttactgtgggaaatgctcagagggcaacaggtctgtccaagatggcctgctctcaacacaggtcctgcgtgccttagcttatgtcatgagaaagaaaagcaaaaataaagaaaagggccagtccctggatcctgcccaaaacaacagggcggctgctctaggaaggggaggtgacatgtccaggccctcacccccagctgacctccctgaagtgcccactcaaggccatcctggctatgagaccctcgcatgcgtcccctgagagagaggagctatgatgatcccatcacaaatgaggaaaccagagcagggaggccaaaagactggtgtgtagccaggccaggcctctgtctcccacaggtgcatgcaaactttgatgccactgcccaaacccttcttccagtgacatcttatttgcaaagagaggtcagaacagctctaagaggctgagcatggtgactcatgcctgtattcccagcactttgggaggctatggcaggaggatcgcttgagtccaggagtttgagaccagcctaggcaatatggcgagacctcatctctacaaaaaatacaaaaaaacaaaaaaattagctgggcacagctgcacacctgtggtctcagcaactcaggagaccgaggtgggaggatcatttgaggccgggaggatcatttgaggccaggagtttgagacctgcctgagcaacatgggaagatcccatagctacaaaaaattttaaaaattagccaggcatggtggtgggcacctgtggtctcagctacttgggaggctgaggtggaaggattgcttgagcctggagggttgaggctgctgtgagctgtgattgtgccactgcactccagcctgggcaacagaatgagactctgtctcaaaaaataaaataaaaccaaaaaaagaagctctaagagctgctctggtgggaaggagtttggggggacagaggcctccttgcatggcttaagcacccctgccctagtgataccccaagtcccatccagaaaccttggggggcatggcagccctgtgccttcacacccagggtctaggctatctgaacaactctgagaggagttttcaggacacacgagcgcggcacttaccagagacagtgaccacgatgtactgctggggtgcaggcgaaggggtgggtgcaccggttggctgcgagggtgcgggtacagccgggagctccgtcacgtactgcttctggccacccggtggctgtgcctggggctgggggctctgcagctcggtgacatattggggctgaggggtggcagcagcggtgggtggctgcgggggctggggtgccgctgggggtggtggcggtggcggctggggctgggcttgtggcggggcctgtggcggctgggatggtggcggggctgcctgtagctcagtatacgcctgtgttgccatgccaacggtggggaaaatgataataaataaggcttttttttttttttaattccttgggaagaaagacggggatgggggagagaaaaacaaaacaaaacaaaagaaggaaaaacaggaattaatccacaggcagagaaagcagggacagctctgggttccctggagatgtgcttgggttcatcactaacttaattaaatccccaggctggtggccagaaatatccaacccgtcactgcagggggaccagctgtagaccagggctggagccccactccgcacccccactcaccccaagccaggactcctgccttcccagtccctggtacccagagacccccacatccacataggatcgcatttccccacactgcgggggaacttgggcctgtgtggttgctctgtgccctcacccagagaaaaatggtacggttctcactgggtcactctcaactaccaggggctgccccctcccttgcctccatctccttagctgaggaccccaagtgggcacttcctgagggctcttgtaggccaggcacagggctgggcactttccctatgttagttcatctttttaaaatgtctattaggccgggcacagtggctcatgcctgcaattccagcactttgggaggccgaggtgagcggatcacttgaggtcaggagttcgagaccagcctggccaacatggtgaaaccccgtctctactaaaaatacaaaatttgctgggcgtggtggtgcatgcctgtagtcccagctactcaggaggctgaggcaggagaatcacttgaacctgggaggcggaggtggcagtaagccaagattgcaccactgtactccagcctgggagacccaagactctgtctaaatatatatgtgtgtgtgtgtgtgtgtgtgtgtgtgtgtgtgtgtgtatttttttacttatatattgaaatctacatgtacatatatatacatatatagtatatatatacacacacatatacactgtatacatatatgtacacatgtatatatattgtatatgtatattgaaatatacatacatatatatatatatatatatatatatatatatatatatatatataatcatttttttcagagatgggagtctcattatcatgcccagtctggtcttgaactcctgggctcaagcaatcctcctgccttagcctcccaaaaagtgctgggattctaggtgtgagccaccacgcccggcctatttcattttaaactttccaacaaccatgtctgggtttgggttctgtctgctagatagggagctgaggctcagagaggttaaggtgcttgccccaggccacacagcggggaagtggtggcagggctgcatttgaactctgggtgttctatgctcctgactcgtcagtttattgccggaaagcagagtcatggggaaagctgcctcccagggacccgtgccagttccctacgtgcctgccatctggacttgggattctcggctgagtagcattcccagtgggaaggtgttttgagtccaaaaagcccctgtgagctgcatggggccacaggggctttttgggccctctgtctgggagcagttatgggtcttgacaccagatgtaagctcatcagtgggacagtgcccttctgtggccaggggtgacagggctgggagcaggcccaggctgcactgagaacctggcagctgcggctgacttcagaacagggccggccttggccaagcgcagtggctcacgcctgtaatcccaacactttgggagaccagggtggctggatcacctgaagtcaggcactcaagaccagcctggtcaacatggcgaaacccagtctctactaaaagtacaaaaatcagctgggcatggtggcacatgcctgtaatcccagctacttaggaggatgaggcaggagaatcacttgaacctgggaggcggaggttgcaatgagccgagatcttgtcactgcattccagcttgggcaacaaagtgacactctgtctccaaaaaaaaaaaaaaaaaaaaaaaaaaattaaacgggagtggtggcgcgcacctgtaatcccagctactcaggaggctgaggtgggagaattgcttgaacccaggaggcagaggttgcagagagctgtgagccgagattgttccactgcactccagcctcagtgacacagcaacaccctgtctcagagcaaaacaaaacaaaaggaaagaacagggcaggcctggctgttaaagggtgtgttcctctcccaggtgctgggctgggcatggcctccctccggctcagccccactgtagcaggggatcggcagatggtttggggacccttgtactcataagccctatccccaggtccaaagcatttgagggacagtgggacagaggcacgagtggttaagaggaaaggctccagatccgtgcttttgtggctcctgcctggccccagaaggcatttgggtctgagagccctgcctgcagctggccatgactccgggcagtactgcctcctggctagcaactggaccagagcctcttctgcactaacactcagcacccatgtgccacgatgtgcccagatggccctccagccgcagggtgaccctcaaaggaaggaggaggtaaaaaacaactgctgttggttgaccaggagcccccagacccctccactgaggtcacctcctcctggcagtcgtatgagggaggcatcatcatgcccattttacagatgagctgagcgaggctgaggggtaggctgctgaaagcctcgagcaactggtgaggggggattgaacccaggtctctctgacccccagatacattctgtcagtccccaaccctacttaggatgccaggcacagggctcatttgcttttttttttttttttttttttgagatggagtatcactctgtcatccaggctggagtgcagtggcacgatcttggctcactgcaacctctgcccccacgggttcaagtgattctcctgcctcagcctcccgagtagctgcgactacaggagcctactaccacatccagctaattttcgtgtttttagtggagacagggtttcaccatgttggttgggcaggtcttgaactcctgacctcaagtaatccgcccacctcggcctcccaaagtgctaggattacaggcgtgagccaccgcgcccaaccttcatttgcttcttaaagtaagtacacggcatcttgccggtcttccaacagggagacccaagcgtcacctgcaaaggttacgccccctgcccaaggccgcagttaagggcagcagaactggcaagggggaagccggcccaagcagcccaggggaggctggttcccatccttcacgcctccctgtgcctccctcccccgggatccaggttctgctcttggatgccaaactcaagaggtgtccgagttagcaggggggcaaggtaggtaagaaacgagccctggacggggatggatgcaccacgatttgaatttggctatctcctaactgtgtgacttttgaggagagcccctacggctccatctgtgaaatgggaggacggctggccctaccaggcggggctgctgagggttcaagctgatcctgtgggcagtgtgtggccaggcacctggcatgctgtaagcacgcaggaaatggctctggctccttcactgcccagggccctttaacgcagttccaggaaagatgaaaataccttctggccctgcctgctgccttccagcctccagagctttgtgctgctgaggatgaaggaaacaggagcttacacttgcctcttggatgtgccctctgggcttgcggcaggcttgggagggactccaggaccctcctggctggcaggaacagagctgacagggccctggggccaccctccctgccaggtgaggtcattctggtaggagtggaggcaggcaggatgagaagccgtttggggccttcccacctagcaggtggccagccttagtgctccgaggcccagggactcgggcagcagagaaacttgcccaccgtgagagggaaaaggctgctgcctgccttgaacaaggcgaagaccatcctcctccagcccctgccctccccaaactcctttctgccagcattagaggggtggaggttcctcacaccatcgggtccaaatctggcccagctcgggtactcaagtcactgtagccgacgacccttcatctgtctggtgtcagaccctcacccacatgaaccctggcgctatgtcttaactcattaacatattaccaaccttcttctgggcctcagttgcctgtcacctggggataacgagaacacccaattcatcaaattgctgcaaagatccaatgagatcaggccgggcacggtggctcacacctataattccagcactttgtgaggcctaggcaggtggatcagctgaggtcaggagttcgagaccagtctggccaacatggcgaaaccccgtctctataaaaatacaaaaattggccaggtatggtggcgtgtgcctgtagccccacctattcgggaggctgaggcagaagaatcacttgaacccaggaggcagagggtgcagtgagcagagatcacaccactgcaatccagcctgggtgactgggtgacagagcaagactctgtctcaagaaaaaaaaaaaatccaatgagatcagctcagcacccaataaacactgataagtggcaggtgttattattcattcaacaaatatccaagccaggttgggacagaggaggaaggagacaggatcttcaagctcttgggaggggacaccaagaggaaatccaacctaagctttcgtcagcaacatcatgcagattcctgagctctactgcccagtgagtctgaaatggccccagagtctgttttagctggtcccttagatgattctgaggcagacagtcctgacagcactctgagaaatgctggccttggctttctcagccctaagagacctggccccttgtggcccctcccacaaagaaagggctttaaaagctcctcacttactggctctttctcctcctagggatacaaagcccatgggcctcatcccttccactcaggggcaagaagaggaggcaatgattaatttctaaaaggctgagctcaaaaggaggaggtgggagatcgaggaacaactaaaccaacttctctattggaggccttctcagcactgtgattgtcaatctttttcctacaattatttgaccaaagagcccttttctaccttttaaggagactacattaagcaattatacaggtttgttccctagagagaaataaatcacatatacatacatagcatgaggtattgcccatatatttgagcgtgagaaccctttctttatggagcctggcacacaaaacaagggaattacttaacaaactgttccttggcaatgaatctgccaagaaaagcactagtggctgcacctaccttcaaagccagcagctgcttatggagactgtttaaatctattactttaaatgagggctcggcaaagttctgtaagggccaagcagtaaacgttattagttttgtggctagtctctgcagcagctgttcaactctgccactgtaatgtgaaagtggccatgcacaataggtaaacaaatgagcaggctgtgtgcgaataaaactttatttctagacactgagatttgaacttcatgtaattttcacatatcatgaaatataattccggtgttgatatttccaataatttaaaaatgtaaaaatcattcttagctcaccagccaaaaacaggcagcaggccatagtttgttgaaccctgtgttttttttttgtttttttttgtttttgaggcaaagtttctctttcgttgcccaggctggagtgcaatggcacagtctctgctcactgcaacctctgcctcccgggttcaagtgattctcctgtctcagcctcctgaggagctgggattacaggtgcccaccaccatgcctggctagcttttgtatttttagtacagatggggtttcaccatgttagccaggctggtctcgaactcctgacctcaggtgatcctcccaccttggcctcccaaagtgctgggattacaggcatgagccaccgcgactggcctgacccctgttttggatgccagattctctaatcaaatggtttacatcctcagcaaggccctcccaaagatatagaaagaaaactcactctcttcatctatagaatggcttcaataatgaacttgcagaagaatggcaaaattaaatgggatgatgtgtgtttctctcatcctctatatccaattcatttagaagatttgtcaattactcctccaaaatatatcctagaggccgggcgtggtggcttatgcctgtgatcccagcactttggaaggctgaggcgggcggatcatttgaggtcaggagtttgaagccagtctagccaacatggcgaaaccccgtctctactaaaaatacaaaaattagctgggtgtggtggtgtgtggctgtaatcccagctactcaggaggcttaggcaggaggatcgcttgagtctggcggggcagaggttgcagtgagctgagattgtgccactgcatgcatacaaacacacacatacacatacacatacacacacacacactcgcacacatctcctaatgactgggcgcagtgctcacatctataatcccaccactttgggagtccaagattggaggatcacttgagcccaggagttcaagaccagcctaagcaacaaagtgacgccttatctctataaaaaagtgaaaaaatcagctaggcatagtacccgacacctgaagtcccagctgctcgggaggctggggtgggagaatcacttgagcccaggagttccaggcttcagtgagctatgatcacaccgccacactccagtctgggcaacagaacaagaccctgtctctttaaaatatatcctggacaggcatggcggctcacgcctgtaatctcagcactttgagagcccagggcaggaagattgcttgaggccagaagtttgagaccagtcttagcagcatagccgagactccatctcgacaaaaaaattttaaaaattaggtgggcgtgatggcgtgtgcctgtaatcccagctactcgggaggctgaggtagaattgcttgaacccaggaggcagaggttgcagtgagcctctctgcaaaaacaaaaaaaacaaaaaacaaaacaaaacaaaaaaatgctgcagatccattcctgcctctcatggcctcggccccacctcttcctcccacctggcatgctgtccccaccgccaccttcacggctggcttctcctccttattcaggtctcagctcgtacacacttccttgggtctgaaggtaccctcaagcacatactactattttatttgcttcctgacactgtgtttccctgttgagtttattttctttctttttcgtttcttagagacaaggtctcactctgttgcccaggctggagcacagtggcacaatcacagctcactgtaaccttgaattcctgggctcaagtgatcctccggcctcagcctccacagtatatgggaacgcaggcctgtgccacgacacctggctaatttttaaatctttttaagagatggggtctcgctatgttgcccaggctggtctcaaactcctgggcttaagtgatcctcatgtctcagcctcccgaagtgctgggattacaagcataagccactgagtctggctggatttattttcttcctcctagttcctcttccctccctgactggaaaggtaagggccccacaggcagagacctggtgggcctggtctctgtctcagctcctagaaaactgacaggcaaggccgggagcagtggctcacgcctgtaatcccaatattttgggaggctgaggcgggcagatcgcctgaagtcagaatttcaagtctagcctggccaacatggtgaaaccctgtctctactaaaaatacagaaattaggctgctgcggtggctcacacctatagttccagcactttgggaggccaaagcgtgtggatcacctgaggtcaggagttcgacaccagcctggccaacatggtgaaaccctgtctctactaaaaatacaaaaattagccgggcatggtggtgggtgcctgtaatcccagctactcgggaggctgaggcaggagaatctcttgaacctgggaggtggaggttgcggtgagccaagattgcgccattgcattccagcctgggcaacaagagagacactccgtctcaaataaaccaaaccgaaacaaaacaaaaatgagccggtcatggtggcgggcatctgtattcccaggtactcggatggctgaggcaagagaactgcttgaacccaggaggtggatgttgcagtgagccaagatcgtgccactgcactccagcctggatgacagagtgagactctgtctcaaaaaaaaaaaaaaaaaaaaattagccaggcatggtggcaggcatctgtaatcccagctactcgggaggctgaagcaggagaattgcttgaactggggaggtggaggttgcggtgagctgagatcacgccactgcactccatcctgggcgacagagtaggactctgtctcaacaaaaaaaagaaagaaagaaagaaaaaagaaaagaaaactgacaggcaaatagtgggggttttgactcttactgtccaggcagcataaatgatgcaccagaacacactgctagtgagcatcaaaggcaggttccagtctatcaactgctgagaccgtgtgagaaagttacttcctgccacaagcctgcttgtgctacagagccaggcaatgccttctggtccagaacaggcctgggaagcaggtgggagaaagtctttctcgcctaggaagaccacgtcctgtacagctgctattgaaggcagcatctctgcgggcggggcagcctggccatccccttccctgagatgctcaggtacatgacagaggagaagggtgaggacctcggctccagagacgccattccaagctccccaccgttcccacaatgtccacatccccgctcacccagctgcctcctggaaggcttgggactgtgtctgggcctgagcccaagtagcattttgtgtgtgtgttttgagacagtcttgctctgtcacccaggctcaagtgcagtggcacgatcttggctcactgcaacttccatctccacggttcaagggattctcctgcctcagcctcctaaatagctgggactactacagtcatgtgctaccatgcccggctactttttgtatttttagtagagatagggtttcaccgtgttggccaggctggtctccaactctttacctcaagtgatccacccaccttggcctctcaaagtgctgggggagtgagcacccaaattgagccactgtgcccggccaggatttttctttctagtgactctcctaaagccagagaacagccattcagcagccaggggagtgactttcccactacaaactggatccctggtatccagcttcctggatccctgtcatcgacccacacagcccagcaagcgagaagcaagtcaacctttaaagccacgagggctctcactggattcaaaatgataaaaataaaagccaacggtgtatttccgagggttgaacaggaagcgacaatcaccgtaacagcagaggctaacataactacattagcaattactttgtatttagttagtttcagcaattcctatgtatttgatattcaacaggtattattttctgggatccatagcacagaaacatgagattgaaaggactaccaaggattactgcccctagatgaaaggaagggaaactgaggcccagaaaacttaagtaactcacctaagagcacacagctagaaaagctgactgtttcaagtcagcttcaaatcaccctagtgttctcttcctagtcaaatgactcctcaggcccttcatctgtaaatgtaactggtgactgaggcagtcaacatgaccagataattggtaacatcactttctgctcagttagcttttttttttttgagacaagtctcactctgttgcccaggctggagtgcagtggcctgtgatctcagctcactgcaacctccgcctcccaggctcaagcaattcttgtgtctcagcctcccgagtagctgggattacaggcatgtgccaccacgcctggctaatttttttagaaacagggtttcaccatgttggccgggctagtctcaaactcctgacctcaggtgatccgcccacctcagcctcccaaagtgctgggattacaggtgtgagccaccacgcccagcctgctcagttagcttttttaagaagggctagccgggcgcggtggctcacgcctgtaatcccagcattttgggaggccgaggcaggtaaatctcgaggtcaagagatcaagaccatcctgaccaacatggtgaaaccccgtctctactaaaaatacgaaaatcagccgggcatgatggcgagcgcctgtagtcccagcgactcaggagactgaggcaggagaatcacttgtacccgggaggcggaggctgcagtgagccaaaatcaagccactgcactccagcctggccacagagtgagactccgtctccaaaaaaaaaagtgctgatgatccgtctagcaacttggcatttctagcttttttgtttgttttactgaaaattaatctccacctgtcctaactttcaaagagtccctgcctcctctaaaaagggccaggcctagaaaaagtacctggagaagttaggacccgccaacccccaccagaccaatctcaaactcttgggaaaaagcctgaaatgatccttttccttggaatgtattgactgatttaaaaggaaatggctgcagtttgcacaccgacactaagctcaaaagcaagacggagaataagccaactagacttggcctggctggctacttaaaaaaaaaattcctccccgagctggcaggatattgtcaccctaaaaagcagtggcaaagattctcctctcacaaacatggatagcttccccttccctctgaccgctcctgcccacgtggccctagaggctgggaccttgtcagtgacatgtgactcggttgacactcgtttgacacaaaaacatgtgtctggccaagagaagcgggtttaaaaaatctaagaaacttcctcaggcttcatttgctcccccattcccagtaggggagacctcgatgggcaggacccagaaacgttccatctccaggaacaaacccccgcaacctcaaaccaggaaacatcaggtctcaaacagcagcccagagaaaagcactcaggtttctgttcctctaaagcattccctcatggtcactcctccctaccatggactttgatttctgcaaaccagatcctccacgctaaagccaaatcgactcctagctcctccatgaaactttgcttcctctttgcttcctcccagagagaaggtggcaggtttaggagtgggctgcagtgttgaaatcaggactagctgacagttattttatcaaaccacattcagaaacggtagatacgaggaaaaggttcaaagataagccgtaagtaaaattcctggaaggaatgaggagtcccggtactgcaggaaaagggcgatgtcaatgattctccccattttacaggatggaaaactgaggcctcagatggacaggcacttgtccaagttctgagtcctgggacaactgcaaagctcttaaggaagaagggagtcgcttaaggatctggaaggcggaccgggtggtggctgcccaccctggttcccgaggtggaggttggggagacccagccggccccgcccataccttccctcctggtcccgcccacccaccttggccccgcctcgtacctccctcgctcccattggcccagcctccccaggcccgccccttcgcgctcccgacatataaaagccccccgccccggcctgccgacctccactcgccgcgggcctgcgagcgcccgcccctcgcgggggccgggccgcggggacgggggcgggtggtgtcgttccagccgggccccggccccctcccccacggtccagacagtcgccgccgccattttgaccgcccgccccttccccccggactgtgattacagagacacctactgccccggccccgccgcccaccccggcccggccagccaccccggggccgccctggttacctccgcttctccccacttctgtctgcggaaacgcttttcggaggtctcggagtcgatgttgggaaggggacgggacgtgctggggtccccgggccgggcctggggggtgggggtgggggtcggccgggcggttgttgttgttgactcgcgttgccgggttgcttggtcgccacgactaccgtggctatggcgcctccgtttccctcaccggggcaactgttgctacccaccctagttacgtcacgcgcgggggcggggcccggggtgattggcggcggccggagaagtgattggacggcgccaggccttgcagctaaactattagttccgatgcacgcttttcaacaccctctggacttcccggcgatctgatttatcagtatgaatgtccatcaaaagaaactgaaccctcaaaggcagccgggcccgtcactccggcagggaagcagctggttaagaataaaggggtaggactcgtgaggacgggattggtttgccgatgtaaaaccggcctcctggttcgactaaagggacgtcaatctaccaaaggtttgccgcgctctctggctggaggccgtgcgcatgctcggcacgcaaggccgattgggagttgtagtccgctcttgcgtacactttacatgtcttaccaaattaaaaaggcgagaaaggaagactccgctccagacttctctctcgctcggtgggccagtttctggcttcttgcgctgacgtcaggggaggaatgcagtgacgcagcgcagcccctctgtgacgacagcggcgaaggccggactcgggattcgatgacgtcactgggcgcgcgtcccccttccccactgcccatggccccgtcggggttgggtggaagcgggaggccgcggcggggttcgatcccagctcccacccgctggggtgacatcctcctccgcccaagccggccagacagcgcggccgccgcgccttctcccgcctcccggtcccctccagccggaaaaggtcaccgctgccggggtgaccgcggctatctctgccccgcaggcggtgcggccgccttgggaaaggtctctgcaaggcgggggacttcattcgcggcttcaaccgcggtagataagcaaaggtcagccccgacccagcccagggagcttggtccgcccaggagagctcaccacaacccccgccacacacacacacctcccacacatacgctcctctgtgcctcagtttcctcaagggactgtctgggtgctgcaggacgagaagagacagaaacagggcccggactagggtgaacatcttgggagcaaaaactcagtcatcaagataaataatcttctaattcaatatttgttaaatatccaaattaatgggaaaaaataaatctatgatgaacaaaacatcacaattttaaataaagacaggatccgccaacacagggattaaggtgagatgcgttatgcaagctcagggtcagatcttgtgtttaaaataaatttattattattattttttgagacggagtctcactctgtcgctgaggctggagtgcagtggcgcaatctcggctcactgcaagctccgcctcccaggttcacgccattctcctgcctcagcctcccgagtagctgggactacaggtgctcgccaccacgcccggctaattttttgtatatttagtagagacggggtttcaccgtgttagccaggatggtctcgatctcctgacctcgtgatccgcccgcctcggcctcccaaagtgctggggttacaggcgtgagccaccacgcccggcctactttttatgttttaaatgtcaattatcttatgactgagctctttggccttctcttaaattttgcattctcatcccaggtaggccctagaacagcaaggggaaaagaaaacaggctcagacagccctgaagtctaatgccagccctgctgtgtggcattcagaaagtgactccacctaagtttgtttcctaattcaaccaacattatatttcctcggtgcaaggccctgggctatacaagtgaagaaaggtgacttcatttatggtggctcacacctgtaatcccagcactttgggaggccaagcaaggaagattgcttgagccaaggagttcaagaccagccttggcaacaaagcaagacacccgtctctacaaaaattagctgggcatggtagtgtatgcctgtaatcccagctactccggaggctgaggtaggaggattgcttgaacccgggagggggaggttgcagtgaaccaagattctgccactgcactccagcctgggcgacagagcgagactttgtctcaaaaaaaaaaaagcaattagctaggcgtggtggcatgtgcctgtggtcccagctactctggaggctgaggctggcaggattggttcagctccggaggtagaggctgcagtaagcaatgattgtgtggtccagcctgagtctcagaaaaaaaagaaaaaaaggaaaaaaaagaaagcaaacaactccctttgcattctaggatgggatacacaataaacagataaattgtaagataggctccttagagtcctgagagcaacataagagagtggggtaggagaatgagaggatgctgtagccagtgttatctgaggggggatgtcccacagaatgagcctgagtggtgagagacgaagcaagcctcataaatccaggtggaggggccggtcatgatggctcatgcctgtaatcccagcactttgggaggccaagttcaggagttccagaacagtctggccaacacggcgaaatcctgtctctactaaaaatactaaaataggtcggtgtggtggcacgtgcctgtagtcccagctactggggaggctgaggtgggagaatcacttgaacctgggaggcagaggttgcagtgagccaagatcgcgccactgtactccagcctgggcaacacagtgagactccgtctcaaaaaaaaaaaaaaaaaacggggggagagaactgccttcaaagctgggaacaggaacttctgctaaagccaggagagataaggttgtagaggtaataatagccacataattcccagcgaacccagcaaagtgggacgctccccgctcttgacaggtgggcaatggatgcccagagagaggaagtaggtgccctctctgccagaggcgtgtgaaccagagcaactccatcttgaacaggaactgggtaaaatgaggctgagacctgctaggcttcattcctaaatggttaaggcattcttagtcacaggataagacaggaggtcagcgcaaaatacagttcataaagaccttgctggctgggtgcagtggctcatgcctataatccgaacagtttgggaggcggaagtgggcggatcacttgaggtcaggagttcgagaccagtatggaaaacatggcaaaacccgatttctaataaaaatacgaaaattagatgggcgtggtggtgggcacctgtaatctcaactacttggaggctgaggcaggagaatcgctcgaacccgagaggcagaggttgcagtgagccgagatcaccccactgcactccagcctgggtgacagagtgagactccatctcaaataaataaataaataaataaataaataaataaataaataaataaaaataaagacctcgccgggcgtggtggctcacgcctgtaatcccgtcactttgggaggctaaggtgggcagatcacgaggtcaggattttgagaccagcctggccaacatggtgaaaccccatctgtactaaaaatgcaaaaattagccgggtgtggtggcgtgcgcctgtaatcccagctactagggaggctgaggcagaattacttgaacccgggaggtggagagtgcagtgtgccaggatcgcgccactgcactccagcctgggtgacattgtgagactctgtttcaaaaaagataaaaattttaaaaataatttagaaaaatacataaataaagaccttgctgataaaacaggttgcagtaaagaagctggctcaaacccaccaaaaccaagatggccatgagagtaacgtctggtcctcactgctacactcccaccagcaccattacagtttacaaatgccatggcaacgccaggaagttactttatatggactaaaaacaagaggcatggaataatccaccccttgtttagcatatcatcaagaaataaggctgagtgtggtggctcatgcctgtaatcccagcactttgggaggccgaagctggcagatcgcttgaggtcgggagttcaagaacagcctggccagcatggcgaaaccccgtctctacttaaaatacaaaaattagccgggcgtgtggcgcatgcctgtgatcccagctactcaggaggctgaggcaagagaattgcttgatcccgggtggcagaggttgcagtgagccaagatcacaccactgcactccagcctgggcaacatggagactccatctcaaaaaaaataaaaaaaaatacagccctcgaggctgctctatggagtaaccattcttttattccttacaaatttgcttccactttacggactcacctggaattcttttttttttttttttttttgagacggagtctctctctgtcacctaggctggagttcagtggcacgatcttgactgattgcaacctccgcctcccaggctcaagcgattcttttgcctcagcctcccgagtagctgggactacaggcgagcgccaccacgcctggctaatttttgtatttttagtagagatggggttacaccatattggccaagctggtctctaactcctgacctcgtgatctgcccgcctcggcctcccaaagtgctgggattacaggcgtgagccaccgcaccaggccctgaattctttcttgcgtgatatccaggaaccctgtcttggactctggatcggacccccctttcctgtaacatctccaccccaagatcacgaagctggaggaaccagagcccatctcttttcatgggactttccagtgccctgggtgtgaccctggatgggagaagaggagaagcagcagctccagtctgcctggaattgccggttgagtcccagccctgacagtacctgcaagaattaatgagacttccaggcaggcagtgcccaagaatgaatcccagctggcaatacaagtcacatcagggtcccaggaccagccatggggacttcattgtggggagggaaactagaagccctatttccacctcctacccatttctccaatgcccagaagtagctggaccaagcccagagaccatgtcgtccatcaaaaatattcagctgggcgtggtggctcacacctgtaatcccagcagtttgggaggcctagactggcggatcacctgaggtcagcagtttgagaccagcctggccaacatggtgaaaccccgtctctactaaaaatacaaagttagctgggcatggtggtgtgtgcccataatcccacgtacttgggaggctgaggcaggagaatggctggaacctggaaggtggaggttgcagtgagtcgagatcgcgccactgcacgccagcttgggcgacagagagagactctgtctcaaaaaaaattcattataagactttgtggctggaaatgcaaggtggaggctgaaatgttctatatttttatctggtggaggttgtacagcatatagtcagccctccctgtatccacaggttacacattcattggaagattcaactaactgcaaatcaaacattcaaataggccgtgctctggtactggtataaaaataggcacataggccgggcgtggtggctgaagcctgtaatcccagcactttgggaggccaaggcaggtggatcacttgaggtcaggagttcaagaccagtctggccaacatggtgcaaccccgtctctactaaaaatacaaaaatcaggtgggcgcagtggtgggcacatgtaatctcagctattagggaggctgaggcaggagaatcgcttgaacccgggaggcagaggttgcagtgagccaagatcgcgccactgtactccagcctgggcgacagagtaagaccctgtctaaaaaaaaaaaaaaaaaaaaaaaagcacatagaccataaacccaaatacttaacagccaactggtcttcagcaaagcaaacaaaaacataaaaggggggaaaggacacccttttcaatagtaacgccaggataattggctagccacatgtaggagaatgaaactggatcctcatctctcaccttatacaaaaatcaactcaagatgggtgaaggacttaaatctaagactggaaactataaaaattctggaagataacattggaaaaacccttctagacattggcttaggcaaggatttcatgaccaagagcccaaaggcaaatgcaataaaaacaaagataaatttctgggacttaattagactaaagagctaagtaacagtcagtagagtaaacagacaacctacagagtgggaaaaaatcttcacaatgtaaacatctgacaaaggactaatacccagaatttaaaatgaatttcaacaaatcaacaagaagaaaacaaataatcccatcaaaaagtgggcttaggacatgaatagacatgtctcaaaagaaggtatacgaatgaccagcaaacatatgaaaaaatgctcaacgtcactaatgatcagggagatgcaaatcaaaaccacattgtgataccaccttaaactcctgcaagaatggccataatcaaaaaatcaaaaaaaacagtagatgttggcatggatgcagtgatcagggaaccctcctacacagctggtgggaatgtaaactagtacaaccactatggaaaacagtgtggggagtactcaaggaactaaaagtagaactaccatctgatccagcaatcccactactgcgtatctacccagaggaaaagaagtcattctacaaaaaagatacttgcacatacatgtttatagcagcaaaatttgtcattgcaaaaacgtggacccaatccaaatgcccatcaatcagcgagtggataaagaaactgtggatatatattcaatggaatactactcagccataaaaaggaatgaattaatggcattcgcagcaacctggatggacttggaggctattattctaagtgaagtaactcaggaatggaaaaccaaacatcgtatgttctcactcataagtgggagctaaactatgaggatgcaaaggcataagaatgacacaataggctttggggattcagtgggggaagggtgggaaggggctgagggataaaagactacaaatagggtgcagtgtatactgctcaggtgatgggtgcaccaaaatctcacaaatcaccactaaaaacatgctcatgtaaccaggcaccacctgttccccaataacctatggaagaaaaaaaaagttttttaaaaaaagaggccggacgtggtggctcacgcctgtaatcccagcactttgggaggctgaggtgggcggatcacgaggtcaggagatcgagaccatcctggctaacacggtgaaaccccgtctctactaaaaatacaaaaaattagccgggcatggtggcaggcgtctgtagtcccagctactcgggaggctgaggcaggagaatggcgtgaaaccaggaggcagagcttgcagtgagccaagttcgtgccactgcactccagcctgggtgacagagcgagactccatctcaaaaaaaaaagaaaaactcaaacagtccatgcttggtggctcatgcttgtaatcccagcactttgggagaccaaggtgggaggattacttgaactcagaagttcaagaccagcctgggcaacatagcaaaactccatctctacaaagaaaaaaaagtaatggaaaaaagttcaaataaataataacaggccaggcatgctggcttacgcctgtaattccagcactttgggaggcccaggtgggaggatcacctaggttgggagttcaagaccagctggccaacatggcaaaaccctgtctctactaaaaatacagcaattatctgggcatggtagcttatgcctataatcactttgggaggctgaggtgggtggatcaccagaggtcaggggttcaagaccagcctgggcaacatggtgaaaccccgtctctactaaaaatacaaaaattagccaggtgtgatggcacacccttgtaatcccagctacttgagaggctgaggcaggagaatagcttgaacccaggaggcagaggctgcagtgagcggagatcacaccactggactaccgcctgggcaactgggcaacagagtgagagtctgtctcaaaaaaaaaaaaaaaaaaaaaaaaaggccaggcatttttacttacttacttacttacacctgtaatgccagcactgtgggaggccaaggtgagtggatcacttgaggtcaggagttcgagaccagcctgaccaacatggtgaaaccccgtctctactaatattacaaaaatcagccaggcatggtgttgtgcgcctgtaatcccagctattcgggaggctgaggcaggagaatcacttgcacctgggaggcggaggctgcagtaagccaagatcgcgccactgcaccccagcctgggtgacaagagcaaaactctgtctcaaaacaaagaaaaaagagaaggaaagaattagaaaatcaccatgttgcaaaagccagcaaaatcattgatgcagacagcgatcatctataggtgctaaaaaaagtagatgaggccgggtgcggtggctcatgcctgtaatcccagcactttgggaggccgaggcgggcagatcacctaagatcaggagttcgagaccagcctggctaacatggtgaaaccccatctctactaaaaatacaaaaattagccgggcgaggtggcgggcacttgtaatctcagctactcggtaggctgaggcatgagaatgacttgaacccgggaggcagaggttgcagtgagccgagattgcatcactgcactctagcctgaacaacagagccagactccatccaaaaaaaaaaaaaaaaaaaaaatttggccgggggtggtggctcatgcctgtaatcccagcactttgggaggctgaggtgagcagatcacctgaggtcaggagttggagactagcctgaccaccatgccgaaaccccgtctctactaaaaatacaaaataaataaataaataaataagctgggcgtggtggcagttgcctgtaatcccagctactcgagaggctgaggcaagagaattgcttaaacctgggagttggaggttgcagtgagcgagaccatgccattgcactccagcctggtcaacagagcgggactctgtctcaaaaaaaaaaaaaattaaaaaaagaaggaaaaagatcaataatccaaaagtatactaggcaagggaggttaccagagagtacagaggaaactaatggtccttaaacacatgggactttgccctgccttgcttgtggtcaggaaaatgcaaattttctctactctgagatactatttttcacatgtcatgttggcaagaaaccaaagttcgataacactctctgttggtaaggctgtaaggcagcagaacttttacccattgctagagagagtgtgaatcgctctaacacctgagggggaatatttgtcaatatgcgtaaaaattacaaatgcacacagtctttgagccagaaatcccgcttcggaaaatttatccacagagacacttgcatatgtgtaaaatgacgttctgtatggcgatgtcagcctaagaacaaacgagtggaaaaaatgtccatctctgagagtgaaattaaccataaagcattcacacagcagcatgctatgcagctgtgaaaaaataaaaataaaaaataacaagaatgtggccaggcacagtggctcacgcctgtaatcccagcactctgggaggccaaggcgggcctatcacttgaggtcaggagtttgagaccagcctggccaacatggtgaaatcccatctctactaaaaaataaaaaaattagctgggcatggtggcatgcacctgtagtcccagctacttgggaggctgaggcatgagaattccttttttttttttttttttgagacggagtctcactctgtcacccaggctggagtgcagtggcgcgatctcggctcacggcaagctccacctgccaggttcatgccattctcctgcctcagcctcccgagtagctgggactacaggcacctgccaccacgcccagctaattttttgtatttttagtagagatggggtttcaccgtgttagccaggatggtctcgatctcctgacctcgtgatctgcccgcctcggcctcccaaagtgctggggttacaggcgtgagccactgagcccggctgagaattccttgaacctgggagacagaggttgcaatgagccgagttggcgccactgcactccagcctgggcaagagcaagactccgtctcaataaaaattaaaataaaataaaataaagttttgttaagagatctccaacacttgttaagtcacgtgggagaagcaacattcagaagaatgtgtagaacatgctaccttttaatgaaattctgggccaagcatgctggctcatgcctataatcccagcactttgggaggccgaggtgggaggatcacttgagcccagaagttcgagaccagcctgggcaacataataagacctcgtttctagtgagactggacaggatcttgctctgtcacccaggctggagtgcagtggcacaatcatagctcactgcagccgccaactcctgggctcaagtgatcctcccacctcagcctcccaagtagatgggactacaagcacacgccaccaccctgggccaaattttaaaaattcttttggagaaatgaagtctcagccaggtgtggtggctcatgcctataatcccagcactttgggaggctaaggtgggtggatagaaaggtcaggagtttgagaccagcctggccaacatggtgaaaccccatctctactaaaaatacaaaaatttgctgggcctagtggtgcccacctgtaatcccagctacttgggaggctggggcaggaggatctcttgaacccgagaggcgagggttgcagtgagccgagatcataccagtgcactccagtctaggtgacagagcaagactccatctcggaaaaaaatttttaaaagtccgggtgcggtggctcaggcctgtaatcctagcactttgggaggccgaggtgagtggatagcctgaggtcaggagttcaagaccagcctggccaacatggtgaaatgccatctccactagaaatacaaaaattaggccaggcacggtggatcacgcctgtaatcccagcattctgggaggccgaggcgggtggataacgaggtcaggagatcgagaccatcccagccaacatggtgaaaccccgtctctactaaaatacaaaaaattagccaggtgcggtggcatgtgcctgtaatcccagctactcgggaggctgaggcaggggaatcccttgaacctgggaggcggaggttgcagtgagctgaggtcgcaccactgcattccagcctggcgacagagcgagactctgtttcaaaaaaaaaaaaaaaaaaaaaaaattacctgggtgtagtggcgggtgcctgtaatcccagctactcaggaggctgaggaaggagaatcactttaacccaggaggtggaggttgcagtgagccgagatggcgccactgcactccagactgtgcaatgggagggaaactccacctcaagaaaaaaaaaaaaattcacaggggtagaaagtagtatggtggttgccaggggtagaaggaggaaggacggagagagtgtttaatggggacagagttttggttggggaagacaaaatgttctggagatggatgattgcacaataatgtaaatatgggtaatgccactgaatcgtacacttaaaaatagttaaaacagccggacacagtgctcacgcctgtaatcccagcactttgggagcccgaggtggggagatcccctgaggtcaggattcaagaccagcctggccaacatggtgaaaccccgtctctactaaaaatacaaaacacattagctggatgtagtggcgcacgcctgtaattccagctactcgggaggctgagacaggagaatcgctggaacctgggaggtggagactgcagcgagtcaagatggcggcattgcactccagcctgcgcaacaagagcaaaactccatgccaaaagaaaaaaaaaatgttaaaacggtaaattttacatgtattttgccacattaacaaaaaatgtttaggccaggtgcagcagctcatgcctgggcaaaatattgaggccctgtctctaaaaaaaaaaagaaaaaaaaaaacaagaaaaagaaaaatattggccaagcatagtagtgagctgaggtgggaagatggcttgatcccaggggtttgagactgcagtgagctatgatcgtgccactgcactccagtctgagtgacagagccagagccagacaaagccaaagagggaaaaaaatgggtttaacatactggcggggcacaatggctcacacctataatcccagcactttgggaggatgaggcaggcaggttgcttgaactcaggagtttaagaccagcctgggcaacatggtgaaaccctgtttctgcaaaaaaaaaaaaaaaaaaaatttagctgggcgtggtgacatgtgcctgtggtctcagctactctgggaggctgaggcaggaggatcacttgagcccaggaggtcaaggctacagtgagctgggatggtgctactgcacttcagcctgggtgatagagtaagaccctgtctcaaaaaataaataaataaataaataaataaagcaagcctaggagtttgagacctgcctggggcacatactgagaccctgtctctacaaaaaatttaaaaatgagctgagagtggtatgcatctgtggtcccagctactcaggcggctaaggtgggaggataacttgagcccgggagatcgaggctgcagtgagccgtgatattgctgctgactctagcctgggcaacggagtgagaccctgtctcataaagaaaaaaaaaacctgtattcatatttgttttcatgtgtacaaagtaattctggaaagatactcaggaaattaagagctgtggttattcatgagagaaaggggaggaactgaaacttggaaggcagatgctgcttcataaaccttatatgctttgctttttgaagcatgtaaatgtattaactattcgaagataaattaaatagtttggagaagctgagggcagtgatacagacctctaatcccagctatttgggaggctgaggtgggacgatcactttaggaaagggaactaagaccagcctggcaacacagcgagactccagtctcttaaaaaaaaaaaaaaaaaaaaaaaaaatatatatatatatatatatatatatatatatatatatatatatatatatatatttattgtattgctgggcacagtggctcatgtctgtaacctcagcactttgggaggctgaggcaggtggatcacttgaggccaagagtttgagactaccctggccaacatggtgaaacaccatctctaataaaaatacaaaaattagccgggagtggtggcgggtgcctgtagtttcagctactcgggaggctgagacaggagaatcacttgaacccaggaggtggacattgcagtgcactgagatggtgccactgcactccagcctggatgacagagcaagactccatctcaatatatatataatatatatttatatataatatgttaatatattgtatacatacatatatgtatacaacatattaatttatattaaggtaatatattatattaattaattatattatactaattaaattatattaatataagatgtattaatttacatatatttctgtatacaatatattaatatattataaaaatgttacattatgtcctaggctatatttatatgtgctatatttatattatataaataatatatcataaaaatatgttacattatgctatgtatttattttatatagcataatgtaacatataatatataatgtatatattacatattatatattatatattttttgtatacttttttaacatgtccccagagataggaaatataaatctatattatacattatataacatatttatattacatattatatattatatatcataatacattataatatattaattataatataatatattaatatattataacatattctataaataaaatatttatatattatataaatatgttatataatatgttatatataaatgctatgatatattgtataacataaatataaaattatatctcatataatagattatacatgatatataatatacattatatatcatatacattatatatcatacatgatatataataattatatttaatatataatgtatatttttataataattacatataacacatatatttatatattttatatatatatatatatatacagtctgtatcttcaactgttttgtttttttaaaaggacactcataattggatttagggcccacccagataatccaggatgagcttatcttaatataatataatatataattttatattatatattatatattgtattataatataataaatatataaatattttattatatattttataatatatattatatatattatatatataaaataaatatatatattatacataaatataaatatatataatatattatataacctatttatattatatatataaatatataaatatatcatatatatttatgtagaatatatttatatattataatatactatattattataattataatatatttatatataaatatataaatgtatttctatataatatataagtatattatataatagaatatagtataatatataacatctataatatataagtatacttatataatatatattatacaatatataagtatattatatatgtttatataatatataaacatattatataatatgtttatatatgatatatgcatattatgtttattatgatatatgcatattatataatatgtttattatatgatatataaatatatttatatgttatagatgttatgtatattatagatatattataatttataaatgtatatcataataattttataaacttataaatatatattatatatataaagtttggaaatcagggctttatttagaattggcaaaattggcttgcatttttatagtgaacaaaatcatcatgacacccatattcctagcaggtgacatttcccgttctgactatattcatttcactgtagctgctgtaaccagtgtccacaaaccaggtggcttacaccaatgaacatttattcccttcctgttctggttgtcaggagtctgaaatgcaggcgtcgcagggccgcgccccctctgaggcctctaggggagggtccctccttgcctcttccagcttctggaggctccaggccttccttggcttcctcaatggcattaagccaatttctgcctctgtcttcatatgaactttcctcttttgtctgtgtcttcaactcttttgttttttaaaaggacactcataattggatttagggcccacgaagataatccaggttgagctcatcttaaggttctttttaatttttttttaatggagtctcactgtgttgctcagactggagtgcagtggcatgcgatctgggttcaatgcaacctccgactcccgggttcaagcgattctcctggatcagcctcctgagtagctcatattacaggtgcccgtcaccacacccagctaatttttgtattttcagtagagaccgggtttcaccatgttggccaggctggtctggaactcctgacctcaggtgatctgcctgcctcagcttcctgaagtcctgggattacaggcatgagccaccccccaaggccatctaaagattcttaattacatttgcaaaagctctttttctttttctttctttcttttttttttttgagacagggtctcactctgttgccgaggctggagtgcagtgacaccatcccagctcactacagtctcaaattcctgggctcaagcgatcctcccacctcagcctcctgtgtaggggactacaggaacacaccaccatacccagctaatttttgtatttgtagagacgggagtgtcactgtattgtccaagctggtgtggaactcctggcctctagcaatcctcctgccttggtcttccaagtagctgagaccacaggcatgcatgcctggctaatattttctattttttaaaggccagatcttgacattttgcccaggctggtcttaaactcttacgctcaagtgttcctccggcctcagcttcctaagtagctggaaatacaggcacacatcacctcacctggctaaggttttgttttgttttgttttaagataggatctctgtcacccaagctgggtgacacaatcatggctcactgcagccgtgaccttctgggctcaagcaatcctcctgcctcagcctcctgagtagctgagattacaggcacctgccaccgtgcctgactaatttttttattttttagtagagacagggtttcactgtgttggccaggctggtctcaaactcctgaccccaggtgatccgtcctccttggcctcccagtgtgctgggattacaggtgtgagccaccgcacttggtttcaaatacttttttctagtaagatcacatttatagatcccagggtttaggatgtggacatagatttctgcagatcaccatttacacaccacaccgacgagtgctgtgcagaatgcttaggactctatagaatttcaccaaagtccccaagaggctcatgaagcaggtatacttatcatctccatcttcacaatgaactcagagaggtatagggtcttgcccaaggatacacaggaacagagatttgaacctagctatgttgggcccaaaactctgattctatgtgagacacaaaagacgcttctgggctgggtgcagtgactcacgccagcactttgggaggctgaggtgggcagatcacttgagatcaagagtttgaggctagcctggccaacatggcaaaaccccgtctctactaaaaatacaaaaattaaccagacatggtggcgcacacctgcagtcctagctacttgggaggctgaggcacatgaatagcttgaaccctggagacagaggctgcgatgagccgagatcactccattgcactccagtctgagcgacagagtgagaccctgtgtcaaaaaaaaaaaaaaaagaaaagaaaaagaaaaaagaggcttctggtttgaggcccatcagttaagtcaggcaggcaggcagcagatatttcctgaatgcttgttcttccccaggccaggcactgggggcgcaggagaaaagggcaggagggtacctccctacaggaagttcctggagaagaggccgaggggaagagagtattattcaccagccctttagaaacagagcaatcagaggtgacctctgcctccggaaggttgcccttggcctgtgacatccacagcaggcaactggggccaggagtttgtgacagagaaaaggacaaagagatgaagttctaatccaaagggaacgtgtccagtagaaataacatttaaacagcacttacttcatgcaggagattgttgtaaaaatttgactcactcattaaatctttcccattttgcaagtgaggaaaccaaggcacagagagtttaagtgacttggccaaggtcacacagcaggaaagaggcagaggtggaatttgaagccaagcttgccccccttaccagagcccttgtttttgctgtgttttaaagtcgaggtgaaattgacattaacatagctgtgcctggtggctcatgcctgtagtcctagcactttgggaggccaaagggggaggatcacttgagctcaggagttccagatcagcctgggcaacatagttaggcctcatctctttaaaaaagaaagactggccgcagtggtttacatttgtaaaccacctgtttcccacctggctaatttttgtatttttgttagagactgggttttacactacggtggacaggctggtctcaaactcctgaactcaagtgatctgcccgccttggcctcccaaagtgctgggattacagacgtgagccaccgtacctggcctggttagttttattttatatggatgttatctctctctttttttttttttttttgagacagagtttcgctcttgttgcccaggctggagtgcaatggcgtgatctccgctcactgcatcctccgactcccaggttcaagagattctcctgcctcagcctcctgagtagctgggattacaggcatctgccaccatgcccagcaaatttttgtatttttagtagagacgggtttcaccgtgttggccaggctggtctcaaactcttgacctcaagtgatccgtcctcctcagcctcccaaagtgctgggattacaggcatgagccaccatgcccggcctcaattttttttttttttagacaaggtttggctccgttgtacaggctggagtgcagtgatgcaatctcagctcatggcagccttgaacgcttaggcaaaagtgatcttcccacctcagcctcctgagtagctgggatcacagatgtgtgccaccacacctggctaatttttacattatttgtagaggtggggtttcacctgttgcccaggctggtctggaactcttgggttcaagcaatcctcctgccttggctgcccaaagttccggaattacaggcgtgagccatcattcccagcctctcaatatatatatttttattttattatgatgatgatgattattttttgtgacaaagtctcactctgtcgcccacgctgatgcacagtggctcaatctcggctcactgcagactctgcctcctgggttcaagtgagtctcctgcctcagactcctgagtaactgggattacaggcatgtgccaccatgcccagctaatttttgtactattagtagagatggggtttgaccatgtcggccaggctggtctcgaactcctgacctcaagtgactcgcccgcctcagctgcccaaagttctaggattacaggcatgagccactgtgcctggccactgccactaattttacattatggtgagttgtatgattatttcaatatacaactacagtataataataatagaaataaagtgcacaataaatgtgatgcgcttggccaggcgcggtggctcatgcctgtagtcccagcactttgggaggccgaggtggacggatcatgaggtcaagagatcgggaccaacctggacaacatggtgaaacctcgtctctactaaaaatacaaaaattagctgggcgtggtggcatatgcctgtagtcccagctactcggaagctgaggcaggagaatcgcttgaacctgggaggcagaagttgcagtgagccaagattgcgccattgcactccagcctggtgacacagcaagactccatctcaaaaaaaaaaaaaaaaaaaaaaaaagtgatacgcttgaatcatcccgaaaccatccacttgacactccatccatggaaaaattgtcttccacgaaaccggtttctggcgtcaaaaacgttaggatctgctgcctcaggacacccttctgtgtctccgtttcctcatttgtaatatgagaattatcttagtcctgaattcataaccccatgctcttaaaagtgtggtttccgccgggcgcagtgtctcacgcctgtaatcccagcactttgggaggtcgaggcgggcggatcacgaggtcaggagatcgagaccatcctggctaacacagtgaaaccccgtctctactaaaaatacaaaaaattagccgggcgtggtggcgggcgcctgtagtcccagctactcgggaggctgaggcaggagaatggcgtgaacctgggaagtggggagcttgcagtgagccgagatcatgccactgcactccagcctgggcgacagtgcgagactccatctcaaaaaaaaaaaaaaaagaaagaaagaaactgtggtttctgggctgggcgtggtgctccaggctggagtgcaatgacacaatcttggctcactgcaacctctgcctcctgggttcaagcgattctcctgcctcagccttctcagtagctgggattacaggcacccgccaccatgcccggctaatttttatatttttaatagagacagggtttcatcatgttggccaggctggtctcaaactcctgacctcaggtgatccacccgcctcgacctcccaaagtgctgggattacaggtgtgaaccactgtgtccagccaatcccagcacttcgagagtctgacgcatttgggtcccttgagtccaagagtttgagaccagcccgggcaacattgtgaggtctcatctctacaaaaaatacaaaaattagctgagcatggtggtacacacctgtagtcccagctacttaggaggctgaggtgggaggatcatttgaacccgggaattcaaggctgcagtgagctatgttgccaccactacaatccagcctgggcaacatagccagaccctgtctctgaaaaaaagaaaaaaaaaaaagtctggtttctgaaccagcaggatcaatgtcacctgggaactggttggaaatgcagattcttagatatgttccatacctgttgagtcaggagctctgcaggtaggacacaaagatatgtgttttgtttgtttgtttttgagacagagtctcactctgttgcccaggctgaagtgcagtggcgccatctcagctcactgcaacctccacctcccaggttcaagcaattctcctgcctcagcctcccaaggagctggggctacagacatgagccaccacacccggctaattttttgtatttttagtagaggcggggtttcaccatgttggccaggctggtctcgaactccggacctcaggtaatcctcctgccatggcctcccaaagtgctgggattacaggcgtgagccaccgcgcctggcctgatttctgttttaacaagcctacccaaagattctgaagctcactcacatttgagaaccattaccctgggttgttgggagaatcaaatacattacagagatataaaatgctttgagcagctgagggctgtggctcatatctgtaatcccagcactttgggaggctgagacaggcggatcacctgaggccaggagttcgagaccagcctggccaacgtggtaaaaccccgtctctactgaaaatacaaaaattagccaggtgtggtggtgggcgcctgtaatcccaactacttgggaggctgaggcgggagaatttcttgaatctgggaggcggaggttgcagtgagccaagattgtgccattgggactgtacctctagcctgggtgacagagcgagactccatctaaacaaacaaacaaacaaataaacaataaaatgcttacagtagtgtgcctggcctcgtagcacatactgcactgggcgttcactgctattatgatcttcgaagaggtccaggaccctaacgttgtggggatctggttgtgtcaccttaccccgccttttgggattatgcgtttctggtctctgcaggttggagaccttctcgcctctctgtcaatgatgttgacaataagctgggccacatcaccctgtccctagcgaaaggttatcacttcgctggggacatgagaaaggtcgggttgggggggccgtgcctgtctcccctctgctggagaagataagggaggcactcagctttcttcaggcagagtgtgggggagccacgatgtataaatggggggccaagaggcagcagagacactggcccactctcacgttcaaagcatctccgtccagcatggccaggtacatgctgctgctgctcctggcggtatgggtgctgaccggggagctgtggccgggagctgaggcccgggcagcgccttacggggtcaggctttgcggccgagaattcatccgagcagtcatcttcacctgcgggggctcccggtggagacgatcagacatcctggcccacgaggctatgggtgaggctggggagagagtggatgtagaaggggaacaggtggctggatgggtcccaggagctaaggacagagataagaggaggttgctggaggaggagggtccctgtcctgccacattcagccagggacacctgcccagccttgaaacaagggctcaggagttagcagagctgcagagctgggatggggtgttgcaagccatccatgggggctggaagtctgaggacaggtgggggcggggagcgtgccatttgcaaagacaacaccgaagtgttttccaaccctttccagcaggtaatgtgaagggtgtggtatacacatagctgggtttgtcacctaatgcatgacctctccccagcaagttggtttttcttccgtctctgagtgtcttttttttggagatgtggtctcactccattgcccaggcttgaatgcagtggcccaatcactgctcattgcagcctcgacctcccaggctcaagtgattctcctgcctccgcctccagagtagttgagaccacaggcacctgacaccatgcctggctagttttaaattttttttttgtagaaacaggggtctcactatgttgcctaggctggtctcgaactcctgggctcaagtgatcctcccacctcggcctccctaagtgctgagattagagtctctgagtgtctttatcttcaaatgggagacacagttcctgaatcttgcaggattaagtggtatgattaaatcaaaacagattagggcagagtctcagcagggcagcggcacaatctgggatccatcaggagagtcagagggaacagaagacctagcttcatgaggggcagggacctggcaaatagatattcatgatggtgagaaggaggataggtatgagcgtggacatagaagacacaccacttggattcagatagtagctctacaatgtaatagttgtgtgttcatgtgctactattttttttttttttgagacagaatctcattctgttgcccaggctggagtgcagtggtgcaatcttggctcactgtaacctccatcacctgggttcaagcgattctcgtgcctccagcctcccaagtagctgggattacagatgtgtgccaccatacctcgctaatctttttatttttagtagagacagtttcaccatgttggccaggctggtctccaactcctgacctcaggtgatcctcccacctcagcctcccaaagtgctgggattacaggcatgagccaccgcgcccagccatgcaaattctttactgagtcctgcctcagtggtctcctctggaaaatacgggtgataactgcacccacctcaactggttatcactgagaagaataaagaagttaacctgctaaagcacttaaaacgttgtttgacacaaagtaagtgatcaataaattattattattattattattattattattattatttttgagacagggtcttgctctgttgcccagactggagtgcagtggtgtgatcacagctcactgcagcttcaacctcttgggctcaagcaattctcctgcctcagcctcctgagtagctgggactacaggcttgtgccaacatgtctaactttttattatttgtagagacagggtagtgctgtgttgtccaggctgttcttgaactcctggttctggtgatcctccagcatgtgcccctggaagtgctgggattacaggtgtgagacaccgtgcccggactcaatagtcatttttgagtgctcatcatgttccagacattgttctaagtttttttttttaatgaatattaactccttataaaacttgagaaggttggagtaattatttttttccactttgcagaaaagaacattgaggctccaagaagtaaatttacttgctcacgattagagaagctggattcatgctcagtcagcccagctcccaaatgtaccaggtcctcaattaataaagagtaaggagaaataaatgacagggctgggtgcggtggctcacgcctgtaatcccagcactttgggtggctgaggtgggcacatcacttgaggtcaggagtttgcgaccagcctgaacaacatggtgaaccccatctctataacaatacaaaaatcagccaggcctgctggcagacacctgtaatcccacctactctggcagagccagaatttgaacccaggactgggtggaataaaaactctgaactatgtctatgactgttgtcacaagatcagagctagactggccaggagccatgactgtgggtgcagcagcagctgagccctgatcactaactctgttcatcttttgcaggagataccttcccggatgcagatgctgatgaagacagtctggcaggcgagctggatgaggccatggggtccagcgagtggctggccctgaccaagtcaccccaggccttttacagggggcgacccagctggcaaggaacccctggggttcttcggggcagccgagatgtcctggctggcctttccagcagctgctgcaagtgggggtgtagcaaaagtgaaatcagtagcctttgctagtttgagggctgggcagccgtgggcaccaggaccaatgccccagtcctgccatccactcaactagtgtctggctgggcacctgtctttcgagcctcacacattcattcattcatctacaagtcacagaggcactgtgggctcaggcacagtctcccgacaccacctatccaaccctgccctttgaccagcctatcatgaccctggcccctaaggaagctgtgcccctgcctggtcaagtggggacccccccatcctgacccctgacctctccccagccctaaccatgcgtttgcctggcctacacactccactgccacaactgggtccctactctacctaggctggccacacagagacccctgcccccttcccagtccaaactgtggccattgtcccctgaccagctaaaatcaagcctctgtctcagtccagcctttgcacgcacgcttcctttgccctgctttccatcccctctccctccaactcccctgccagagttccaaggctgtggaccccagagaaggtggcaggtggcccccctaggagagctctgggcacattcgaatcttcccaaactccaataataaaaattcgaagactttggcagagagtgtgtgtgtgtgtgtatggttgttgggcgtaggacaggtttcggggatgcgcggtacgcggtaccacccctcggaggcccccacccccagacgcccaggccgcctccccactccccctcaagcagccccagccggggactttccgtcgcggggaaggggcggggaccctgagcgaaaggtgcggaggcggcctgccggggtggttcggcttcccgttgccgcctcgggcgctgtacccagagctcgaagaggagcagcgcggccgcgcggacccggcaaggctgggccggactcggggctcccgagggacgccatgcggggaggcaggggcgcccctttctggctgtggccgctgcccaagctggcgctgctgcctctgttgtgggtgcttttccagcggacgcgtccccagggtgagtgctggagggagctcgtgtcccgggcgctgccgctgcgctccccgcgaaggcgccagtgctccaggataagccacgcgtatgcagagcgaacggtagaggtgcaggcgccactcggctcctcccggggcagggacccggcgacactggggaatgggcggcagcgaggtcgaaccggagccccggggcggggtgggggagctctctgggtggttaacaggatgtggcgagcacagggaaagggggggtttgcacggagcccgggcaggggtgcctagcgcctcccttcctgctgctcatttccctaagcccccccaccttgcaattgtcagaagtccaagttctggggtgtgcaggcggaagggggggattcgaccccctttcctgagaccctctgactccctctccaggcagcgccgggccactgcagtgctacggagttggacccttgggcgacttgaactgctcgtgggagcctcttggggacctgggagccccctccgagttacacctccagagccaaaagtagtgagtacagggaggtgacgtggggaaacaggctttggaggtggccgctcaggccccaggctgctttggttgaaaggttccaggagtcaagcctggccaacatggtgaaaccctgtctatactaaaaatacaaaaaaaaaaaaaaaaaaaaaattacccaggggtggtggcgcgcgcctgtagtccctgatactcaggaggctgagacaggagaatcgcttgaacccgggaggcggaggttgcagtaagcccagatctcgccactgcactccagcctgggggacagagggagactctgtctcaaaaaaaaaaaaaaaaaaaaagaaaagaaaagaaaagaaagtcccaggagtctgcccccctcccccaatactcctccactccttcaattctagcttccctcgtttctttgctgtgtcaccctgggcaagtcactttccctctttgagtctccttttcatttctctattaaatagcaatcatagggccaggagaggtggtttgcacctgtcatcccagcattttgggaggccgaggcgggaggatcgcttgagcccaggaggagttcagagttttagagagcccgtcacttttttttttttttttttttgaaacggagtttcactcttgttgcccaggctggaatgcaatggtgtggtctcggctcactgcaacctccacctcctgggttcaagcgattctcctgcctcagcctccagagtagctgggattacaggcatgtgccaccatgcctggctaatttttgtatttttagtagaggggggaggtttcaccatgttggccaggctggtcttgaactcctgacctcaggtgatccacccgcctcagcctcccaaagttctgggattacaggtgtgagccaccgtgcctggccgagagcccgtctcttaaaaatataaaatataatataaataaagggaaataggccaggcgcagtggttcacacctataatcccagcactttgagaggccgaggtgggcagattacttgaggtcaggagttcaagaccagctgtagtaattccagctactcgggaggctgaggtgggaggatcacttgaacccaggaggcagaggttgcggtgagctaagatcgtgccattgcactccagcctgggtgacagagtgagactctgtctcaaaaaaattttaaaaaataaaagctggcgtggtggctcacgcctataatctcagcactttgggaggccgaggcgggcagatcacgaggtcaggagttcgagaccagcctgaccaacatggtgaaaccctgtctccactaaaaatacaaagattagccgatgtggtggtgcatgcctgtaatcccagttactcaggaggctgaggcaggagaattgcttgaacccaggaagtggaggttgcagtgagctgagatcgcaccactgcactccagcctggccgacagagcgagactccatctcaaaaacactaaaaataaaaaataaaaaagggaaataataacagaacctgcctccgaaggttaagtctgaggattcaaagagttaggtgcttggcaaggagaaagttgcttcataatgtgaacctggtttttattgctgtgtgacattaggcaagtcacttaacctctctgagcatgttaaaagattattcagtgtggtgctggggatgctgcagtgaaagaggtagacagaaagccctgcccacagtccaaggactccatgtgtttcttcatgatgaatcatacctggaaactcataatttcaaattgggctaagtgagggaagaggaaaagagtcaatgaaagataagaatgggagacagaggtcctggatttttttttctttttaatattaatggttaaaatacacacaacaggccctacacggtggctcacgcctgtaatcccagcactttgggaggccgagacaggcagatcacctgaggtcaggagttgcagaccagcctggccaacatggtgaaactccgtctctactaaaaatacaaaaattagccaggcgtggtggcacatgcctgtagccccagctatttgggagtctgaggcaggagaatcgctggaactcgggaggcagaggttggagtgagccaagatcgcgccactgtactccagcctgggtgacagagcaagactctgtctaaaaaaaaaaaaaggccgggcgcggtggctcaagcctgtaatcctagcactttgggaggccgaggcggtggatcatgaggtcaggagatcgagaccatcctggctaacacggtgaaaccccgtctctactaaaaatacaaaaaaattagctgggcgtggtggctggcgcctgtagtcccagctactcaggaggctgaggcaggagagtggcgtgaacccaggaggcagagcttgcaatgagccgagatcgcgccactgcactccagcctgggcaacagagcgagactccgtctcaaaaaaaaaaaaaattcatacaacataaaacttaacgatatttttaaaaatttgttttgggaacagggtcttactcctgttgcccaggctggagtgcagtggggcagtcagttcactgcagcgacttctcaggctcaggtgatcctcccacctcagcctcccaagtagctgggactacaggcatgcaacaccatgcccagctaattttttaaatatatatttttagtagacacagggttttaccatgttgcccagactgctttcgaactactggcctcaagagatccacctcctttgtcctcccaaagtgctgggactacaggcgtgagtcactgtgcctggccaaaatctacgatcttaaccatttttaagtgtccagttcagtggcattaagtacattcccatggtgctatcccggttaccattcacctccagaagggggcctagtttttttttatttgagatggagtttcgctcttgttgcccaggctggagtgcaatggcgcgatctcggctcactgcaacctccgcctcccgggttccagcaattctcctgcctcagcctccagagtagttgggattacaggcacacgccaccacgcatggctaattttgtatttttagtagagatggggtttctccatgttggtctggctggtctcgaactcccgacctcaggtgatccacccacctgggcctcccaaagtgctgggattacaggcagaagccactgagcctggcggggggcctagttttaattggtacagggagggggagtcagagaagccacatcttttctatttttattttagttttattgatttatgtattgattttatttattttgagaagaggtcttgctctgtcacccaggctagagtgcagcggtgcgatcatagctcactgcaacctcaaactcctgggctccagccattttccctcctcggccttcccagtagttggaattacaggaatgtgtcaccatgaccagctaatttttaaaaattttttgtagtggtagctcacgtctgtaatcccagcactttgggaggccgaggcagaaggatggcttgagcccaggggttggagaccagcctgggcaacgtagtgagacccgtctctattaaaaaaaaaaaaaagaaagaagaagaagaagaagaagaggaagaggagggaaaaaagtaagaataattttaaaagtaaataaataaataatttttttggtagagacagagtcttgctctgttgcctagggtagtctcaaactcctgagctcaagcgatcctcccatcttgccctcccaaaataatggaattacaggtgctactatgcccagcctgagattttgtactctttggccatcatcttctccccctagcctctgtagtcaccagtttactctgcctctaggaggagttcagatgttttagattccacgtatcaatgaaaacatgtggtgtttgtctttccgtgtcttatttcacgtaacataatgttcgccatttccatccacattgttacaaatgacaggatttcctttttttttttttttttgagacagaatctggctctgtcacccaggctggagtgcagtggcgcgatctcagctcactgcaacctctgcctccccggtccaagcgattctcgtgcctcagcctcccgagtagctgagattataggtgcgcatctccacatctggctaatttttgtatttttagtagagccgagtttcaccatgtcagccaggctgatctcaaactcttgatctcaagtaatccacccacctcggcctcccaaagtgctgggattacaggcgtgagccaccacgcacagtgtattttcttcttttttaaggttgaatagtattccatcgtgtatgtataccacatttttttttttttgagacaaagtctcgctctgtcgctcaggctggagtgcaatggcgtgatctcagctcactgcaacctctgcctccagggttcaagcgattctcctgctttagcctcctgagtagctgggatgacaggcatgcgccatcacacctggctaatttttgtatttttaatagagacggggtttcgccatgtttgtcaggctggtctcgaactcctgacccgaactctgcctgccttggcctcccaaagtgctgggattacaggcatgagccaccgtgcccggccccacatattcttgatccatacatctggtgatggacacattccatatattggctgttgtgaatagtgctgcattgggaagacacgtccgttggacaaactgatttcatttccttatttatatatttatttttactttttttttttttgagacagagtctcactctgttgcccaggctggagggcaatggagcaatctcagctcaatgcaacctccatctttcgggttcaagtgattctcctgcctcccaagtagctgggactacaagcgtctgccaggacacacggctaatttttgtatttttagtagagatggggtttcacgatgttgtccaggctggtctccaactcctggcttcaagtgatccgcctgcctcggcctcccaaagtgctgggattacaggcgtgagccaccacgcctggccccttcttactatttgttaaacacaccaggcacagtttggcctccaggtctttgcaccctgtgtttcctcttcctggaatgctgttcttctagctactgcatggttctgtcctcatctccttcaggcctttattcaaatgtctcctcaggctgggcgtgatgtccctgcacctgtaatcccaacactgggaggccaagggggatggtgcgggggattgcttgaggccaggagttcgagaccagtctggccaacagagtgagaccctctcgctctctctctctttttttttttttttgaaatggagtcttgctctgttgccaggctggagtgcagtggtgcgatctcggctcactgcaacctccaactccctggttcaagcgattctcctgcctcagccttccgagtagctgggattacaggcacgtgccaccacgtccagctaatttttgtatttttagtagagacgggggtttcaccgtgttggccaggatggtctcgatctcttgacttcgtgatccacctgcctcgggctcccaaagtgctaggattacaggcgtgagccactgcacctggcctgtctctctctttctatatatggtgcttttgttgctgtttttgagacagggtcttatcctgtcacccaggctggagtgcagtggcatgactgcaactcaacctcctgggctcaatcgatcctcccaccccagcctctcaagtagttggaaccacaagtgcgcgccactacccctggctaatttttaaaacattttttgtagacatgggggtctcagtatgtgactgcttgaggccaagagttagaggagaccagcctgggcaacatagcaagaccccatttctacaaaaaatttaaaaattagctgaacattgtgatgcacacctgttatcccagctactctggaggctgaggcaggaggattgcttgagcctaggagttcaaggttgcagtgatctatgatcgcactgctccagttacagagtgaggtcgtgtctctaaaaaaaaaaaaaaaaaaaaagagagagaggaaagggccgggcgcagtggctcacgcctgtaattccagtactttgggaggccgagacaggcggatcacctgaggtcgggagttcgagaccagcctgaccaacatggagaaaccctgtctctactaaaagtacaaaactagccgggagtggtggcgcatgcctgtaattccagccactagggaggctgaggcaggagaatcgcttgaacctgggaggcagaggttgcggtgagccaagatcgcaccattgcactccaagctgggcaacaagaacaaaaatctgtctcaaaagaaaaaaaaaagagagagagaaagcaaggaaggaagggagggagggaggaaagaagggagagggagaggaagggaaggaaagaaagaaaaagagagagagaaaagagcagttatgaccaggtatggtggctcatgcctgtaatcttagcaatttgggaggccgaggtgtgtgcatcacttgaggtcaggagttcgagaccagcctagccaacatggtgaaaccccatcgctactaaaaacacaaaaaaattggccaggtgtggtggcacacgcctataattctagctacttgggaggatgaggtgggaggatcacttgaacccaggaggcagaggttgcagtaagccaagatcacgacattatactccaacctaggtgactgtcttaaaaaaaaaaaagaaaaagagcagttacttttattaccctcattttgtagatgaggaaactgatgcacagagaagttaagtcacttactcaaggtcacacagctctgaagcagcagaggtgggatttgaacccaagcagagcaggctgcagccactctgttggcacaagggtggttatcagtggccctggctctagccgagtgtgcatctcatccccgcctctctcctcacagccgttccaacaaaacccagactgtggcagtggcagccggacggagctgggtggccattcctcgggaacagctcaccatgtctgacaaactccttgtctggggcactaaggcaggccagcctctctggccccccgtcttcgtgaacctagaaacccaaagtaacgtggcaggagggtgggcgctctatgcggggtgggtgctcttggagggcgtggctcactacaccctagtttccccttccccagtgaagccaaacgccccccggctgggccctgacgtggacttttccgaggatgaccccctggaggccactgtccattgggccccacctacatggccatctcataaagttctgatctgccagttccactaccgaagatgtcaggaggcggcctggaccctggtgagtgctggggtccttttctccccaccctattccgggcggggactgaggcaacatctcctaatctgagacccagcccaggactcattctgtgcctgcccctgagcctgtatgcctcccactcaaaatgcctgcatgtgcctcttgttcagctacaaattctcctcccatggctgggcacggtggttcacgcctgtaatcccagcactttgggaggctgagggggatggatcacttgaggtcaagagttcgagaccagcctggccaacatggtgaaatcccatctccactaaaaatacaaaaattacctaggcatggtggtgggcgcctgtaatcccagctactgaaagctgaagcaggggaatcactggaacccgagaggcagaggttgcagtgagctgagattgggccactgtgctccagcctgagctacagagtgagactcagtctcaaaaaaaaaaaattttttttctcctgccaaaataatctatcacccggtcacagtggctcatttctaaaatcccagcaccttgggaggctgaggcaggaagattgtttgaggtcaagagtttgagaccagcctgggcaggatagcaagactcgtctctaagaagttaaaaaataatctgaccaggtgcggtggctcacacctgtaatcccagcactgtgggaggccaaggagagtggatcacctgaggtcaggagttcgggaccagcctggccaacatggtgaaaccccatctctactaaaaatacaaaaaagtagctgggcgtgctggtgggtgcctgtagtcccagctaattgagaggctaaggcaggagagaatcacttgaacccaggaggtggaggttgcagtgagctgagatcgtgccactgcactccacactccagcctggcaacagagcaagactccgtctcaaaaaaaaaaagaagaagaagagttcagaattgtgattattcatgcaattcagagcaacactgagatgcagaatttttttttttttttttgagatggcgttttgctcttaattgcccaggctggagtgcaatggcatgatctcggctcactgtaacctccaccatctaggttcaagcgattctcctgcctcagcctcccgagtagctgggattacaggcatgtgccatcatgcccggctcattttgtattttcagtagagacggggtttctccatgttggtcaggctggtcttgaactcctgacctcaggtgatccacccacctgggcctcccaaagtgctgggattacaggcatgagccactgcacccggcccccttttttttttgagacggagtctcactgtgttgcccaggctggagtgcagtggtgccatctcaactcactgcaacctccacctctcaggttcaagtgattcccccacctcagcccctcaagtaggtgggattacaggcatgtgccaccatgcccagctaagtttttgtattttttttaatagagatggggtttcgctatttggccaggctggtctcgaactcctgacctcaggtgatccacccacctccacctcctaaagtgttgggattacaggcgtgagccacctcacccggctgagatgcagactttggaatctgactacctcagtgctcagctccagcacaccagctctgtgaccttgggctagtcactttccctctctgggcctcagttccctcgtctgtaaaacgagataataatagaagttaccacttcctgctatacctagcacatagagtgaccaccttttctctgtctgctcgggactgtggcaatttttttgacaggcccatgttctggaaacccccttggtcctgggcaaatacaaatggttgctcactctgctgatagataagttcaagtaccagctaggcgcagtagctctaatcccagcactttgggaggccgaggtgggcagatcacctaaggtcaggagttcaagaccagcctggccaagatggtgaaaccccgtctctactaaaaatacaaaaattggctgggcttggtggctcacacctgtaatcccagcactgtgggaggccgaggcgggcggatcacgaggtcaggagatcgagaccatcttggccaacatggtgaaactctgtctctactaaaatacaaaaaattagctgggcatggtggcgcgtgcctgtaatcccagctacttgggaggctgaggcaggggaatcgcttgaacccaggaggcagaggttgaagtgagctgagatcgtgccactgcactccagcctggcgacagagcaagactctgcctcaaaaaaaaaaaaaaaaaaattaaccaggtgtggtggtgggtgcctgtaatcccagctactcaggaggctgaggcaggagaattgcttgaacccaggagggagaggttgcagtgagccaagatcacaccactgcactctagcctgggccacaacgagactgtctcaaaacgaaaaacaaaggaaaaaaaaaaagataagttcaaatacccttgactcaggccctgggcccatcacgctcgcctgtctctcccccagctggaaccggagctgaagaccatacccctgacccctgttgagatccaagatttggagctagccactggctacaaagtgtatggccgctgccggatggagaaagaagaggatttgtggggcgagtggagccccattttgtccttccagacaccgccttctggtgaggatatctgggcttgccctcaatccacgcccctcccacccccagaagtctgtccaatcatgtcccactcatttgttccccgtttcctcatccttgccagctccaaaagatgtgtgggtatcagggaacctctgtgggacgcctggaggagaggaacctttgcttctatggaaggtgagcttcaggcaccagttacatttctctgcacgtgttaggaaacccctaaataacaatgacataaggccggatgcagtggctcacgcttgtaatcccaacactgctgtgggaggccgaggagggtggatcacttgaggtcagcagttggagaccagcctggccaacatggtgaaaccccatctctactaaaaatacaaaacttcacggggagtggtcgtgggcgcctgtaatcccagctactctggaggctgaggcagaagaatcacttgaacccaggaggtgaaggttgcagtgagccgagatcacaccactgcactccagcctgggcaacaagagtgaaactccgtctccaaaacaaaaaacaaacaaaacccaatgacataaacaagacagagtttaccatgctgcccccttgaggttgcttcgaagattcaaggatgggttgctaaagtggtcagcacagggtggggcatggagcaagtctccaccaatgtcagctgcttccgagaggtctgagccataaggatgggtgcagatattccgggcaggggcagcagatgcaaaaacctgacagcgagactggagctcagctccagaaaatataacacagtgtgctaagagtttatttattcatttatttattttgagatggagtctcgctctgttgcccaggctggagtgcagcagcgtcatctcatctcagctcactgcaacctccacctcccaggttcaagccattctctgcctcagcctcccaagtagctgggattacaggtgcccccccaccacgcccggctaatttttgtatttttagtagagatgggggtttcaccatcttggccaggggggccttgaactcctgacctcatgatccagccacctcggcctcccaaagtgctggaattacaggcgggagccaccgcgcctggcctgtgctaagagtttaaatgctagtatcaaaagggtattaataggctgggcatggtggctcatgcctgtaatcccagcactttgagaggctcaggtgggcagatcacttgaggtcaggagttcgagaccagcctggccaacatggtgaaaccccatctctactaaaaatacaaaaattagctgggcctggtggcaggcacctgtaatcccagctacttaggaggctgagacaggagaatcgcttgaacctgggaggtggaggttgcagtgagctgagctcgagccactgcactccagtctgggcaacaagagcaagactctgtctcacaaaaaaaaaaaaaaaaaaggtattataaaatggctgacaaggtgcaattatcctcactgattcaaatctgtgaagcacctgctatgtgccaggtggcattgcttgacccttgctctcagtaaataagcaaaggaacacgatgacaggtgtggttttccaccttcttagaccacacaatccagtatcttttatttatttatgtatttgagatggagtgtcactcttgttgcccaggctggagtgcaatggggcgatcttggctcaccgcaacctccgcctcctgggttcaagcgattctcctgcctcagcctcctgagtagctgtgattataggcgcccgccaccacacccggctaatttttgtatttttagtagagacgaggtttcaccatgttggccaggctggtctcgaactcctgaaatcaggtgatctgcccactcggcctcccaaagtgctgggattacaggtgtgagccaccgtgcctggccgatattttaaaaaattaaatcagcaaactagagttcaaggaccaactgcctgttttcagaaatacagtttgattggaaccaagaccagggttagggaggtgagcagggtagggtcacacaggtgcaggatcaaatcctgtttttactttaaaatcttgatattttggaccgagtgggtggctcatacctgtaatcccagcactttgagagtctgaggcaggaggaccacttgaggccaggagttcgagaccagcctgggcaacatagcaagctacccatctatacagagaataaaacattaccaggggccgggcacagtggctcagcctgtaatcccaacactttgggaggccgaggcgggtggatcataaggtcaggagttcaagaccagcctggccaagatggtgaaacccccatctctactaaaaatacacaaattagccgggcgtggtggcaggcacctgtaatcccagctacttaggaggctgaggcaggagaatctcctgaacccggggaggttgcagtgagctcagattgcgccactgcactccagcctgggtgacagaatgagactctgtctccaaaaaaaaaaaaaaaaattagcggggtgtggtggcatgcgtctatagtcccagctactggggaggctgaggtgggaggatcacttcagcctaggatgttgaggctgcagtgagctatgattgcaccaccgcacttcagcctgtacaatagtgagaacttatgtcaaaaagaaaaaaaaaaaaaagatggctgggcgtggtggctcacgcctgtaatcccagcactttgggaggccgagacgggcggattttttttttaagagacaaggtcaggagatcaagaccatcctggctaacatgtgaaaccccgtctctactaaaaatacaaaaaattagccggacgtggtggcaggcgcctgtagtcccaggtactggggaggctgaggcaggcgaatggcgtgaacccgggaggcagagcttgcagtgagccgagatggcgccactgcactccagcctgggcgacagagcgagactctgtctcaaaaaaaaaaaaaaagttgatattttgtttgtcatgggtttttaggcattaattttcatttattacaatactgcattaaaatattatttatctcacttattgggtttttggtatcccccactcccttttaaattttgcacctggccaggtttgctgactcacgcctgtaatcctagcactttgggaggctgaggcaggcagatcacttgaggtcaggagtttgagaccagcctggccaacatggtgaaaccccgtctctactaaaaatacaaaaattagccgggcgtgatggcaggcgcctgtaatcccagctactcaggaggctgaggcaggaacatcgcttgaacccgggaggtgaaggttgcagtgagccgagatcacgccacttcactccagtctgggtaacagaatgaagactccgtctcaaaaaacaaacaaacaaacaaacaaaaaatgcttcactgaccggtggtttatcaggtgacctcagggagacacatatatgtgcgtgattaatgggagacattaacccctttttcccttcatctctcaggccccagggccctgtgtgcaggtgagctacaaagtctggttctgggttggaggtcgtgagctgagtccagaaggaattacctgctgctgctccctaattcccagtggggcggagtgggccagggtgtccgctgtcaacgccacaagctgggagcctctcaccaacctctctttggtctgcttgggtaagagactgtgaccttcctcagctcggtgccctggaggggtgggaagtgacttcctgagtgggcagctgagacttctctccaccctccagattcagcctctgccccccgtagcgtggcagtcagcagcatcgctgggagcacggagctactggtgacctggcaaccggggcctggggaaccactggagcatgtagtggactgggctcgagatggggaccccctggagaaactcaactgggtccggcttccccctgggaacctcagtgctctgttaccaggtgaggccctgggacacctgggtctccatccccgctgttagagcagacggatgggtggacttgtaagagggagtgctatgattaaagtagcgtgatggccgggcttggtggctcatgcctgtaatctcagcactttgggaggccgaaaggggcggatcacctgaggtcaggagttggacaccagcctggccaacatagtgaaaccccgtctctactaaaaatacaaaaattagtggggcgtggtggcacatgcctgtagtcccagctactcgggaggctgaggcaggagaatcgcttgaacctgggaggtggaggttgcagtgagccgagattgcgccactgcactctagcctgggtgacagagtgagactcagtctcaaaaaataaataaataaataaataaatagcgtgaattcacacaagacttttttttttgctttttggaggcaagatcccactctgtggcccaggctagagtgcaatggtgccatctcagctcactgcaacttccatctcctgggttcaagtgattctcgtgactcagcttcccgagtagctgggactatgggagcgtaccaccacaatcggttaattttttttttttttttttaagtagagacggggtttcaccatgttggtttggctggtctccaactcctgacctcaagtgatctgcctgccttggcctcccaaagtgctgggattacaggcatgagccactatgcccagcctaacttttcttttttttttttttgagatggaggctggctctgtcacccaggctggagtgcaatggtgtgatctcagctcactgcagccttcacctcccgggttcaagcgattctcgtgcctcagcctctggggagtgactgggatcacaggcccccaccgccatgcccagctaatttttttatttttagtagagacggggtttcaccatgttggctaggctggtgtcaaactcctgacctcaagagatccacccgcattggcctcccaaaatgatgggatgacaggggtgagccaccatgcctggccctttttttttttttttttttggagtcttgctctgtcgcccaggctggagtgcagtggtgcgatatcggctcactgcaagctccacctcctgggttcacgccattctcctgcctcagcctcccgagcaactgggagtacaggcgcccgccaccacgcccggctaatttttttttttttttgtatttttagtaggaacggagtttcaccatattagccaggatggtctcgatctcttgacctcgtgatctgccctcctcagcctcccaaagtgctgggatttcaggcatgagccaccgcacccggcatttttttttttttaagagatgagtctcactctgtcagccaggctggagtgcagtggcgtgatctcagctcactgcagcgtcgacctccatggctcaagcaatcctcccacctcagcgccctgaggagctggtattacaggcatgcgccaccaagcccagccagtttttgtattttttgtagaggtggggtttctccatgttgcccaggctgttcttgaactcctgagctcaggcaatccacctgccttggcctcccaaagtgctgggatgacaggcatgagccacggtacctggcaagaaatctttataaataaataaataaataaataaattaattaattaatgaacttggaagaactgtgaagatgttgggtaagaaatttaggacacagtcccaagacccacaaggatatatgaaccaaagaagcgaaggcccaattatggaaaattcccagttggggaaggctatgtggatgtgatagggtttaggggagagagtgcagcaccctcagctaccatggtaggtgctgtcagttgcctgctcatatctgtttgaccacctcagaggttttaggcctctctcccagctgcccacacttgtttcctggcctaagggctttttctggtcactgaggcattttgcctgcctgagaagcaagatggaaatattgagaagagccctcaggaacagccctcagcatgactaatgaggcttggtggataaataccccagctccgtccccctgagctgggctgactctgcgatgcctgctctctgctggcccctagaggtcccccatgggactgcgtctcagttgtccacagtgagaacctgttccttccccatttcactcccctactgccctattggggttttctgggattacctcctagataaatgacttacagtcagatccttatctcagggtgtccttctggggaccccagtgaagacacctaggaaatgagcatgggaaggagagccaactctaactggtctttatttctttgtcactcagggaatttcactgtcggggtcccctatcgaatcactgtgaccgcagtctctgcttcaggcttggcctctgcatcctccgtctgggggttcagggaggaattaggtaagagtggggctggaggatgggggggcttctgtaacccaggccgaccttgacctactgccttcctccccagcacccctagtggggccaacgctttggcgactccaagatgcccctccagggacccccgccatagcgtggggagaggtcccaaggcaccagcttcgaggccacctcacccactacaccttgtgtgcacagagtggaaccagcccctccgtctgcatgaatggtgagcttccctgcctgctgacctgtcctcccagcccccacaagacccacccatcagtcagccccaccccttgtccccacgtgggcctctttggcccagggaccatacatggtgtcctcaattccctcttggctatcaatgtaacgagctttcattcggccattaaaaatgaggatgccaatctatatttattgacattgaaagatgcttgtcatattttattagtgaaaaagataaaaggatgttaaaattccgtggtatggttccattttttttttttttttttgagacagagtctcgctttgtcaccaggctggagtgcaatggcacgatctcagctcactgcaacctccgcctcccaggttcaagcaattctcctgcctcagcctcctgagtagctgggattacaggcgcatgccaccatgcccggctaatttttgtatttttagtagagacagtttcaccatgttggtcagactgatctcgaactcctgacctcgtgatccacccacctcagcctcccaaagtgcggggattataggtgtgagccactgcgcccggcctatatataattttaaaaatatatatagaaggcccggcatggtgggtcacgcctgtaatcccagcactttgggaggccaaggcaggcagatcacttgaggtcaggagttcgagaccagcctggccaacatggtgaaacctcatctctactaaaaatacaaaaattagccaggcatggtggcacagcctgtagtccagctactcagaaggtggctgaggcactagaattgcttgaatccgggaggtggaggttgcagtgagccaagatcatgcaaagacaaactaaataatatctaagcagtgtatgagatggtgataagtgctgagtagagaatgaagcaaggggctgggcaaggtggctcacacctataatcccagcacttttggaggccgaggtgggcagatcacctgaggtcaggagtttgagaccagtctgaccaatatggtgaaacccagtctctactaaaaatataaaaattagccagatgtggtggcgggcacctgtagtcccagctactcaggaggctaagacagcagaattgcttgaacccaggaggcagaggttgcagtgagctgagatcacatgactgcactccatcctgggcaacagagtgttacagagcgagacttcatgtcaaaaaaaaaaaaaaaaaaagagaatcaaacaaggaaggtgggtggtgaagggggtgcaatttcaaatagagcggggtcaaggaaagcctcacggaagaggtgacctttgagcaaagacctaaaagagatgaggagggagccatgtggatacctgggagagagtgttgcagacagcaggaagagcacatgcaaaggccctgtggtaggcttgaccacctccccaacttctttggttgtgttctccagtgagtggcaacacacagagtgtcaccctgcctgaccttccttggggtccctgtgagctgtgggtgacagcatctaccatcgctggacagggccctcctggtcccatcctccggcttcatctaccaggtaggggggttgggatgggattgccacagggaggggatgtactccacagtggggagaggtagcatctggagtcattacttggaagctaggtgcagtggctcacccctgtaatcctaacactctgggaggctgaggcaggtggatcacttgagcccaggagctcgagaccagcctgggcaacatagtgagacccccttctctacaaaaaataaaacaattagctggatgtggtagcatgcgcctgcggtcccagctcctggagaagctgaggctcgaggatcgcttgagcccaggagttggaggctgcagtacacggattacaccactgcgctccagcctgggcaacaaagcaagaccctgtctttaaaaaattaagaattgccaggcacagtggctcacgcctgtaatctcagcactttgggaggccgaggcgggtggatcagttgaggtcaggagttcgagaccagcctggccaatgtggtgaaaccccatctctactaaaaatacaaaaattagctgggcgtggtggcgtgcggctgtaatcccagctacttgggaggctgagagagaattgcttgaacccaggaggcggaggttgcagtgagctgaggtcgcaccactgcactccagcctgggtgacagggcaagactctgtctcaaaaataaaaataaaaaataaaataaaataaaaaattaagaatgatctcttccctaccctaccagataacaccctgaggtggaaagttctgccgggcatcctattcttgtggggcttgttcctgttggggtgtggcctgagcctggccacctctggaaggtgaggctgtcggatacatgcatctctacccacgtggggaaggcagctgggcattttgctgagcttccagggggcttgaagggaggcctcagggcgcagtcacattcatgaaccctgcaccctgggctggggcatctggccatctggatctgctgccctgactactcctgtcttgccaggtgctaccacctaaggcacaaagtgctgccccgctgggtctgggagaaagttcctgatcctgccaacagcagttcaggccagccccacatggaggtgagtcaaagggccggctagtcggagccctctgggggactggggagtcctggggcagtggggagggggtgaggtgtgggtcggggaggctggggcaggattacaggctcatctcttcccagcaagtacctgaggcccagccccttggggacttgcccatcctggaagtggaggagatggagcccccgccggttatggagtcctcccagcccgcccaggccaccgccccgcttgactctgggtatgagaagcacttcctgcccacacctgaggagctgggccttctggggccccccaggccacaggttctggcctgaaccacacgtctggctgggggctgccagccaggctagagggatgctcatgcaggttgcaccccagtcctggattagccctcttgatggatgaagacactgaggactcagagaggctgagtcacttacctgaggacacccagccaggcagagctgggattgaaggacccctatagagaagggcttggcccccatggggaagacacggatggaaggtggagcaaaggaaaatacatgaaattgagagtggcagctgcctgccaaaatctgttccgctgtaacagaactgaatttggaccccagcacagtggctcacgcctgtaatcccagcactttggcaggccaaggtggaaggatcacttagagctaggagtttgagaccagcctgggcaatatagcaagacccctcactacaaaaataaaacatcaaaaacaaaaacaattagctgggcatgatggcacacacctgtagtccgagccacttgggaggctgaggtgggaggatcggttgagcccaggagttcgaagctgcagggacctctgattgcaccactgcactccaggctgggtaacagaatgagaccttatctcaaaaataaacaaactaataaaaagcaaaaaaaaaaaaaaaagaaaagaaaaaacactgcatttgggcaccatctcagctcccttgcatccaggtgcagcatggactgagttcttgacaacagaatgtggtcagaagtgacatatgccaacacggggtctgggtgggggctcccccacatcctttccttgcctatgagctggaacataacacatgcctatgatccagctttggtcatacccaaggggaaggtggagcaagaaatgaaaaggaacctgaatccctgaatgactgcatggatagaaccactaagaaaaataaacttttatatttttatagctactgtagctttgaggtctttttgttacagcagctcaatctatactctcactgattcataatctttgactgtagcagggttaagcctcaaatttcccaccaggagatgacgctgtgattctgtgctgactacacacacattcaagccgtcttgagtgctttcacattttattttcaagtataaaggcttcatcgcagaaggaggccagggttacaggcagtgggcaaggggtctggaagcccaggtttaggtggacgtgcaggctagctggctcccaggtgccatggccagtcctgtggtccctgtctgtgcctgggaccctcttctgggtgccaagaggccgaggtagctgtgagaggagctggacatggggtggaggggcatgggttcacatgaccgcacaacactggcacgtcttttgcttagggccacttgcctcttcaccctcggtgggggcagatggctcaggctgccgggcaggcgcgtaggtgggcacagggtgggcactggggttggcgctgggcccctccccctgaagcagtggctggcattcggcgggctgctctggggctggggtctctgccagaagaggtgtggcatcccccaaggggccttggccctcagcagcggtttggggcttcactccttcctcctccagggctcctactggcttctcctggggctggggtccttccttctctggccttgtctccgtgttagcctcaaggggaggccctgcctcattcatctcctctgcctgggattcacttccttccctagacccttgttctagattcagatctccctccgtcccttgggtcttctctgtctccaatgattcctcacctccccttttctctgcctccagtgtctcctcccctccctttctctctgcctccagtggttctttggttgcctctggctcttcctcacctcctttcttctctactcccaatggttcttctacctcctcctcctctgcccctcgcttttcctcatctccttccttctctgccctcaaatgtccctcaacttttctctctatgcccagtggttcctcacctccttccctctctgttcccagcttttctgcacttcctctgctctccagctccaacttcttctctcctcctttcctctctaccactggtgacatctccgcttcatccctccctgtccctggcttttcctcacttcctattcccatggattcttccgcttttctcttctctgcctcccaggtctcctcgcctcctcccgtcttggccccctcggcccccagcgggctttcatctcctctctccctccctgccacctcgggcccttccaacccctccaccagcagctcctcccactcttcactgagggtcactctctccacccaaatgaaggatccctcctctcctccagagcctccctgcccatcaccctcagggctgccctggggcacatcttccccttctatggaagctgctgcctctaatctctcctggagcctaggcgagctagtctgcacgacctcagggaccctgcctatctcccccatggcctctgcatcactgccacccaccccctcccagaccacctccacgatgcccctgtcctccttcacccaggccgggagctccaggctaccagctcccttcctgtctccgatggcttccagcaccacttcctccaccttagcctccagctcggggcccgtggcccctgtggcacagtcctctgtggccctcagcccttcccacaccacactcaccacgccccctcctttggcctcacccacccgcccttcggatggcactgccctctgacttagcccctgctctggagtggggatggggctggggcatgggccattggcttctgaggagtctcctgctgccccggggacctgcctcgggcctggcagaaaccccaagacatcctccctgggctcagagggggactctggaggcgtgcccactagtccagccggcagggaggctctcttgttcagatcagtctggcctgggggagtcagaggtggaggggagaggacaaaagggaagacagggttaagatggaacaaaaggactgccatccacactccccttgagtcaccctctcacacccaggctctggggtgacctgacccccagacctaggggctcccacacttacctacagaacctgcctcgacaatggactgggagagaggacggtgaccctgcagagatggcggagacaaggtcaggctggccctcatccccacctccagcctccctgcatgctaggctcccaccccaccacccctaaataccctcagtggctctctattaccttcaggatcaaactccacattgtacctctgccttcctcatctatcttattgccctatgttccagggccttgcacacagtaggtgcttaaacaatactgcattcccatagccaatctgtattaggggcctactttgtcagttactggttaccatgcacaagggacacttaagccttttgtttttggcacttacattccaatcaacataaatacaaattaattttttttttgagatggagtcttgctgtgtcgcccaggctggagtgcagtggcgtaatctcggctcactgcaacgttcgcctcctggtttcaaacgatttccctgtctcagcctccctagtagctgggactacaggcacctgccagcatgcccagctaatttttgtttgagacagagtctcactctgttgcccaggctggagtgcagtggtgtgatctcagctcactgcaacctctgtctccagggttcaagtgattctcctacctcaacctccccagtagctgggactacagggacacaccaccataccgagctaatttttgtgtttttagtagagatggggtttcaccatgttggccaggctggtctccaattcctaaccttaagtgatccgcccacctcggcctcccaaagttctgggattacaggcgtgagccaccatgcctggcctatactgttgttattcccattttagagatgggaaaactaaggcttggaaaaggaaattgacttgccaagaccacagagcaaagtaaaagcgggaagcggatctgaatgcagacctagtggccaggctgcccttggagaaagctgcattcctgattccatgtcctgccttgaggcctgctggccatgccctcccatcccactcccctgattcccccctcacctgtctgcgccagctgggcctgcctgagggcttgtgctgggcacctgtggaagcactttgcaacagttgcagctgggactggagtctgaagaagagagagggctgctaggagctgggcccccaggctccttgggctcctagactcaagcgaccacctccttggaatgtgcccagggtctcgatctcacccagctggggcagggttcgggcagagctagaaggtctccactcacgtgaacaaactgtcttccaggttccggattcgggcctgagcctggccctcgggtgactgggggtccttcgaggtggggtcttcggatggctctggcactgcagctgccccatccattagccaacgttcccggagagacttcctctgggcaggggaagggagttggggctgggcatacagactaccccggtccatgtaaagtcccctcccgacctctgcaggctgggcaggtatcttatcaccacctcacaaccagttgcgacatacatcaggctgggatacatggccacagtgccccccaacgctgcaagtgggcagacatcccttgttccaaacccttccaaaatgaaacgggcacttccaaagtgaaatcaatgtccctccctactggcccctccctaccccaaagctagacttcggctcctctccatctcccccaaattgggacaaacagcatcactgtcccagacttttccccaaatggaacaaatgtccccatgaccaccccacttcgtccctcccaggctgggaaagacataccccgccccggccaagctggaaccaacgcccccaactgcccgctcccccccaaaaattggacagaggctcctatcgtcccccaaaccgacttgcacagacaccccccactccattccccaggctaggcaggcgcccccgcccgcccccaaccttgagacgctccacgcggagtttctcctcctccacctcccggcgcgcggcgcggatctcctcctgcagccgccgcttctcctgcgcacagaggacccggagctgcccgccggccgggcgcggcctccaccacctcctcttccctccctttcccctccctcctccgcggggctcaccggagctcccggggctcccgaggcagcgagcccggcgggggtggcccagcgcgggtctgcacccagggcggggagggggctgcggaggcgctgactcagcggcgggcggagtggggggggcggggcgggggcggggccggccgcgcccgggatgctgcggaggcctcgcccgcgcccaatgggggtctgtggatggggggtgtagggggtggggccttgggacagctatcgggggaggggcagagctggggagctccgagatacgaggttaagagaaatggggatcaaagggagggtgcggccgtacgcggtggctcacgcctgtaatcccaggactttgggagaccgaggcggacagatcgcttgaggtcaggagttctagcctaccctggccaacatggtgaaaacccggctctactaaaaatacaaaaattagctgggcgtggtagcaggcgcctgtaatcccagctaccggggaggctgaggcgggagaatctcttgaactcgggaggcgcaggttgcagtgagcggagatcgcgccactgcactccagcctgggcgacagagcgagactccgtctcaaaaaaagaaaaaaggaggggagggtgctagtgagatgggggtccgaaatggggatgcagccatgggagcccagagtaatggagtgtagacatggaatctagagagatggggtgcagaggtgggggtgcagagagatggggtacagaagtggggtacagtgagatggggtacagaagtggggtgcagataggtggggtatagaagttgagtgcgaagagatagggtacagaagtggggtatagagagatggggtgcagggagatggggttccatagatggggaataaaaaggagggtgctagtgagatggggatccaaaatgggggtgcagccatgggggtccggagagatggggtgcagagatggggatcaaaaggaggatgctagtgagtagtgagatgggagtgcagccacggggtccagagatactgaggtgtagaggtggggatcagggagatgggatacagagataggggtcagaaatatggggtacagaggtggaggtatggatagatggggtatgtaagtgcgtgcggaaagttggggttcagggagatggaggagggaaggatgcaggacagagataggatcagagtggtagagacccagagatgggggagtccagagagacgaggaagtcagggatgaaagttcccaaggaaggactgtcaggatgggggctccgaggtagggagatttgagagatagcggtctgataaaaggcggtccgagagatgcggctcaggcatggggtttttgggaggctggggttcaggaatgaggcatagccgatgcaggctctggaagtgtgggggccacagctccccattctgagggtggtagtgaccagacaggaactggggggcagagggggctggagaattggtgtggggagccctgggcggggctggagctgagggcgctctccgcagagatgacggagagacgagaagggagcatggtggaaagtttgggggtgcccagggcgcggggagggcgtcacttacagcgatgacttctagccgctgccggtagagggagctctccgccatgggcctgttgggagagggcaggggcttcgaggggctcccatcttgaacgcccccctcttggccaagatccctgagcagtatggaaattgccccgagcccagcactttgcctctgtttcccctttgcacctgggaagagtctgggcggggggcgagggtcttgggaggggaactgagcagtgaccacgactggtgaggctaaagccctccctaaatctggctttgtctctctcagcctcagtttcctcatctgtaagatgggcaggaatagcttgaccaccctgtccttgccacccccgatctcagaggacgcttgcaaggagctattcatgcagggaaaagcttagggtacagtgctacaaaaatagtcccattgtttatgaataatcataatttatataattccatgatgaataatatgtatgattaattataataaccatctccagtccaacctgcagaaactctcaaatgccaccaggcccctaacaggctgtgtgcctctttctcttcccagtcccacaccctctctggacctcagctcctacccagaatttctcaagcgctgggggggcaagcgagtctgtggccctcccactgttgccatggtaaccccagagctgcctcctccacctgctaacccccctccctggggacaaggatcactgggtcactctgcctaggactggactctgagctgggaggagggggacttgccatttaaggtttaactcgagattcccctgtcattgtcttcctcaaaacatctctacttctcagcctccagagtggcctctggacccacttaggctcccgtggaagctggagggtgactgtcatactgcaggatgattagggacagtcagtgtcacaccaaccttatcaacacagacatgcattgggcacccctgactatgttgctatgttgaccacgtgtcacaggccagtatctagaaagcgatgtctctctgcctgtcatctccaccggcatggacgggcgctgatcaaaccctcaaacatttattaatttgaacagtcaccctactgggtaagcctcattgcctgaactccagctaggaccttccagatcttctgtggccacaacgtgaaggctattagcacttatagtgctatatatatgatatatatatactatatatagcatatagtgttctaagtgccccacggggtttccgctaggttcccacagccacctctgcctccccctccctgcctctatcatgacacagtggagtcaactctttgctgagttgacattccagctaagaacaaaatcagccaaccattagctagcccgtaacacgtgccaggtgcaatgtaattcactgaatcctcccaacgactctaggaggtaagctatatgaatgtgtccattttatggatgggaaaactgaggttctgagaagtggcagcagtgtccaaggtcatggagccaagatcagaacttgaagctatcagatccaaaatactgagaacacagctggcgaggggggtgggggtgcaggtctaggaatccccatcaaggtagctaagagagcagcctggagaccctgaatgctgtttggggcaaggaattgaagtcatgctctttctttttttgagtcggagtctcgctctgtcacccaggctggagtgcaatggctcaatctcagctcactgcaacccccgcttcctgggttcaagtgattctcctgcctcagcctcctgagtagctgagattacaggcgtgcaccaccaagcccggctaatttttgtatttttagtacagatggggtttcaccatactggccaggctggtctcgaactcctgacctcaggtgatctgcccgcctcggcctcccaaagtgctgggattacaggcgtgagccaccgtgcccggccacgaagtcatgctttgcaagatatcccaaaggaagcccagattctgtgcttataggtttgcccctgggggagggctgaagtcccgtggtctcctgtaccacccccaagatgtaatctccctgcctcttccttgctgggggggatcgggttcccattgctaagcaaccaggtttgtagttggtgaataatgcaatggaggacctagaagggtgaggaaccgaattggggtccctagtgtggggggaagccccttttccaaaactctttccaaacctctgaagccccctctacccttttaaccttaaaaaactctcacccctcagctatgaaaagacttcacacaccccattccatcttgcttatctctaactaactctggaagaacaacgtaggcggcctgggcttctggccacccgcaagagttggtggccatttcatgaaggaggtcatccttgcaatgttgccattgtctttctcaggctgggagcttttaacttctgttggatctcaagccttttctcccaccttggacactgactttaggggcaaaacgtggaacccagtgaccctgaccttccccactccctgcaccacagcagtagccccaccccctggctggactttgggttctcagccctggcagcggaaaatccccgaagaggaaggggcagggggagcctatatctctctcccaccccttgactctttaaggaagggtgacactgatgagcctatggggttggctagccaacccctccactccccgggtccccttaggagagaccactggagctctcggctcccagacaaggccagcatcccccatgagcccctcccaaggccctgcccaccagcccccctgaccccccagacacttacatgggtgtggccagagaccacacctggctctgcagggccatctctgcccagaagttcactttctggtctccgagttctggacccaccacccgcttgcctgaaggtgccccggaggctgtgacttggctgcctggagtgggggggggctgcgggcgggcaccgggagagcaggtccagcgggtttgggccagggaggcggtaggcacaccagagaggggggctgggggctggagggcagttctggggaggtactatcagctgtcctgataaattattcaccagcctctggcctctttgttgcactcagctgcctcccggaaaacactttcacacacgcgtggtcaagcgtgggggtgagagtactgagtcggtgactccccctgccaccagagaatggcatttctacttggcaccccaatcatcttgagtctgactgcctgccaagactcacccacaggagagcaccattgcatagcacacaggctggagactgttttatttttttagagatgggggtctcactctgttgcccaggctaaaatgtagtagtgcgatcatagctcactgcagtttcagactccggggcgcaaacaatcctccctcctcggcttctcaaagtgctgggattacaggcatgagccaccacatctggcagataacattttttaaaattattttttaagaacaggcacagtggtgcatatgtgtaatcctagcactttgggaggcccaggtgggtggatcacctgagggcggagttcgagactggtctgaccaacatggtgaaaccccgtctctgctaaatacaaaaaaaaacttagccgggcatggtggtgcatgcctgtaacctccgctacttgggaggctgaggcagaagaatcacttgaacccaggtggcagaggttgcagttagccaagatcgcaccattgcactccagcctgggcaacaagagcaaaactctgtctaaaaaaaaaaaaattactttttgagccaggcacggtggctcacgcctgtaatcccagcactttgggaggccgaggtgggcggatcacgaggtcaggagtttgagaccagcctggccaacatggagaaagcctgcctctgctaaagatacacattagccaggtgtggtggcacacctgtagtcctagctactcgggaggttgaggcaggagaattgcttgtacccaggaggcggagattgcagggagctgagatcatgccactgcactccagcctgggtgacggagcaagactccgtctgaaaaaaaaaaattactttttgatcgtggtaaaatacacataacaaaatttaccattagtggcatttagtatgttcacaatattatgcaatcctcaccactggttcagaatattttcatcaacccaaaaggaagtgatcactactcattcccctgcctcccgtgcctggcaaccaccaatctgtgtccatctctatggatttgcctattctggactttttgtttttcttttttgtttgtttgtttttttagatggagcctcactctatcgcccaggctagagtgcgatgggcacaatcttggctcactgcaacctccacctgctgggttcaagcaattttcctgcctcagcctcccaagtagctgggattacaggcacccgccatcacgcccagctaatttttgtattcttgtagagacagggtttcaccatgttggccaggctggtcttgaacttctgacctcaggtgatccatcctccttggcctcccaaactgctgggattacaggcgtcagccactgtgcccggactattctggatagttctataaaaatggactcacaggccgggcgcagtggctcatgcctgtaatcccagcattttgggaggctgaggtgggcggattacctgaggtcaggagttcaagaccagcctgaccaacatggagaaaccctatctctactaaaaatacaaaattagccaggcatggtggtgcatacctgtaatctcagctacttgggaggctgaggcaggagaatcacttgaacccgggaggcggaggttgcgatgagccgagatcacgccattgcactccagcctgggcaacaagagcgaaactcggtctcaacaaacaaacaaacaaaagactcacacactatgtggtcttttgtgtttggcttctttcactcagcatcacgttttaaaatttcatccatgtagcgtgtatttatcgttccttaattcttttttttttttttttgagacggagtctcgctctgttgcccaggctggagtgcagtggtgcaatctaggctcactgcaagctccgcctcccgggttcacaccattctcctgcctcagcctcccaagtagctgggactacaggcgcccgccaacacacctggctaatttttgtatttttagtagagacggggtttcactgtgttagccaggatggtctcaatctcctgacctcgtgatccacccgcctcggcctcccaaagtgctgggattacaggcatgagccaccgtgcccagcccccttaattccttttttatggctgaataatatttcatcatatgagtatactatattttgctgatccatttatccattgatagacatttgagttatttccaccttttggaggaaataaaatattctatttattatttatttatttatttgagacagtctcactgtgtcacccaggctggactggagtgcagtggtgcgatcttggctcactgcaacctctgccccccaggttcaagtgattctcctgcctcagactcctgagtagctgggattacaggcatgcgccaccatgcctggctattttttgtgtttttagtagaggcgggtttcaccatattggccaagctggtcttgaactcctgacctcaagtgatccaccccccaaagtgctgggattacagatgtgagccaccacatccagcctatttaattgtttgtagattgattttataactgttaaatatttagatgttggagccaggcatggtggctcatgcctgtaattccaactactcgggaggcggaggcaggaggattgcttaagcccaggaggttgaggctgcagtgagttgtaatcacgccactgcactccagcctaggtgacagagcaagaccctatctcaaataataataataataaggcattattctaggcatgggggcattgggtatagagatgaactagacaaacagaaaatgctattatgcagctcactttctcgtatggggagagagacagataatacacaaatagaaagaaatataaaagcaattggtgccgggtctggtggctcatgcctgtaaacccagcactttggaagcccgagcaggcaaatcaccttaggtcaggagttcgagaccagcctagccaacatggcgaaacccccgactctactaaaaatacaaaaaattagccggccatgcacctgtaatcccagctactcaggaggctgagacaggagaattgcttgaacctgagaggcagaggttgcagtgagccgagatggtgctactgcactccagcctgggcaacagagcaagactccttctcaaaaaaaaaaaataataaaaagaaggctggggccaggcacggtggctcacgcctgtaatcccagcactttgggaggccgaggcaggcagatcatgaggtcaggagatcgagaccatcctggctaacatggtgaaaccctgtctctactaaaaaatacaaaaaaaaaaagaaattatccaggcatggtggcgggcacctgtagtcccagctacatgggaggctgaggcaggagaatggcatgaacccgggaggcagagcttgcagtgagccgagatcatgccactgcactctagcctgggtgacaaagcgagactccctctcaaaaaaagaagaagaagaagaaggctgggcgcggtggctcatgcctgtaatcccagcacatcgggaggccgaggtgggtggatcatgaggtcaggagttcaagaccagcctggccaacgtggtgaaaccccgtctccactaaaaatagaaaaataagccagccgcggtggtgccaccagtaattccagctactcgggaggctgtggcagaagaattgcttgaatcctggaggcagagattgcagtgagccaagatcgcgccactgaactccagcctggttggcagagtgagactttttgtcaaaaaaaaaaaaaaaaaaaaaaaaagaataaaataaaaatgaaagcaattggtggcaactgcaattgggggtgagttattgagaatacctgaaatggggctaaagaaggagtgctcttgtaggctgggttatcagagaccacttccctgaagaagtgacatttgaggtgagacctgaatagaggaaccagccatgtgactgtcatttcaagcagagaaaacagcagtgcaaagaccctgaggtgggaatgcagttgggggaggggttaagggaagtacgaagctgaaatgaagtgacacaaggtgacagtgtgagaagatatgacctgagaagtgggcagggcctgctggggcaaggtagagaattcgtatttttattctaaatttggtgggagcctttgttttatttgtattattattattgttttagagatggtgtcttactatgttgtccaggctgttcttgaactcctaggctcaagccatcctcccgcctgagcctccagggtagctaggattatgagcaagccactgtgcgtggcttgatgggaacctttgagagggaggaggtggctggaaggaacaaggatggagagaagtggatgaatccaaaatctgtttggaggtggagtcaagagagtttgctgatgaattggagggtggctaaagaaagaaattaaggctgactcctggggtactttttggcacgaaaaactgaatgggtgaaattgacacacatggtgaggaggagtagggttggaagaaccaagaatgtggttttggaagtgttcagtctgaaatgtctattagaccggagactgctagatatgagtccaaagcctagcggagcagttagagttagagatataaatttgggagacatcagcataaagattatatatatataatatattaatatattatatatattaatatattatatataaatatattatatataatgtattatatattatatataataatatatttatttatatattataataatgtctataaatatattatatataatatattaataatatataataataaatacataatataataataaatataaatatattattaatttattaataatttattgttgatatattattaataaattaataaatataaaaaataataatataatacatatattatatataatatattaatgtattatatattatatattaatgtattatatattatatattatatatataaatatatatataatatttatatttctatattaatatattatataattatataatattatatattatagatattttataatatattatatatatattagaagtggagtctcaccacttgccacgttgcccaggttggtctcaaactccttgcctcaagtgatcctcctgccacagcctcccaaagcactgggattacaggcgtgagccactgcacccagcgtagatttttttttttgagactgagtctcactctgtcacccaggctggagttcagtggcacgatctcggctcactgcaacctctgcctcacaagttcaagggattctcctgcctcagcctcctgagtagcaggcccacaccatcacgcccacctaaatttttttgtatttttagtagagacggggttccaccacgttggccaggctggtctcgaactcctgacctcaagtgatccaccacctccgcctcccaaagtgctgggattacaggcttgagccactgtgcccagcccagcctagatgtttaaaacatgagattgaaatttgtcagagcctgagtcccaataggaaagattgtgcacttgaggctgggggcagtggctcacgtctgtaatcctagcactttgggaggctgaggcgagtggatcatgaggttaggagttcaagaccagcctggccaagatggtgaaaccctgtctctactaaaaatacaaaattagctgggcgtggtggtgggtgcctgtaatcccagctactcgggaggctgaggcagagaattgcttgaacccaggaggtggaggttgcagtgacccaagattgtgccactgccctccagcctgggcaacagaacaagactccttctcaaaaaaaaaaaaaaaaaaaaaaaaaaagtctgggcacggtggctcatgcctgtaatcccagcactctgggaggctgaggcaggcggatcacctgaggtaacaagttcaagaccggcctggccatggtaaaaccccgtctctactaaaaatacaaaaaattaggtgggcgtgctggcacatgcctgtaatcccaggtacttgggaggctgaggcaggagaatcgctcgaaccccaagaggcaaaggttgcagtgaaccgagaacgcaccattgcactccagcctgggcaacaaaagcgaaactccgtctcaaaaaaaaaaaaaaagattgtgcacttgaacacggtggttgatgagaacttaatagaacccagtttataaagctggaggggaaaccatcaaggcacagtatagacgccctgggttagcaacgcctggcagctgtgaccacctctttgccctggagagagctgtgtagagctactgcctgtagcagagggatgtcaccaatggggcttggaggtaggggacacgggataaactttttcttttttttttgagacagagtctcactctgtcgcccaggctggagtgcaatggtgcgatctcggctcactacaacctccatctcccaggttcaagcaattctcctgcctcagtctcccaagtagctgggattacaggtgcccgccaccacacctggctaatttttagtattcttagtagaaatgggttttcgccatattggccaggctagtctcgaactcctgacctcaggtgatccacctgcctcggcctctcaaagcactgggattacaggcatgagccactgtgcgtggccaattttttttttttttttttttttgagacagagtcttactctgttgctcaggctagagtgcagtggtgtgatcacagctcactgcagccttgatctccctgggctcaggtgatcctcccacctcagcctcctgagtagctgggactgtaggcacacaccaccaacatgctgctaatttttgcattttttgtagagatggggtctcactacgttacccaggctggtcttgaactcctggggctcaagccatctgcccgcctcagcctcccaaagtgttgggattacaggtgtgaaccactgtgcccagctaaacatctttttttagtgttattttatttatttatttatttagagacagggtctttctctgtcacccaggctggagtgtattggcattattatagcttactgcggcctcaaactcctaggctcaaatgatcctcccacctcaggctcccaagtgcctgggcctacagacacaaaccaccatacccagctaattttaaaaaatgtcttctttccttcattccttccctccttccttccttctttccctccctccctccctccctttctttctctctttccttctttctttctttcttcctttctgcagagacagggtctccctatattacccaggctggtttcaagcaatcctcctgcctcggcctcccaaagtgttaaaattacaggtgtgagccaccgtgcctggctgggataaacaccttggcttcactctcctctctttcatcaggtgaccccaaggaagccagaggggaaggaaggtgaaacagaagtctgagaaggggtgcttgtgaagtagaaggaaatcaggagggggtggtgtacccaaagaccaaggagctaatgaagaggaggacagggaatgaagtcagtgattgaatctgccaaacggacatcataggtgctcttgtcagaaaaagctcccagaagccgggcgcggtggctcatacctgtaatcctggcactttgggaggctgaggcgggcagatcatgaggtcaggagttcgagaccagcctggccaacatggtgaaaccccgtctctactaaaactacaaaaaaattagctgggcgtggtggcacacgcctataatcccagctactccagaggctgaagcaggagaatcgcttgaactcaggaggcggaggttgcagtgagccaagatcacaccactgcactccagcctgggcaacagagtgagacttcgtctcaaaaaagaaaaagagccctttcatcaatcttcccgcgtccgccgattcctcctccttggtcgccgcgtccttggctggcgtcagaaaaatggctacaaacttcctagcacatgagaagatctggtttgacaagttcaaatatgacgacgcagaaaggagattctatcagcagatgaacaggcctgtggcaggtgcctcccgccaggagaacggcgccagcgtgatcctccatgacattgtgagagccagagagaacatccagaaatccctggctggaagctcaggccccggggcctccagtggccccagcggagaccacagcgagctcgttgtccggatcgccagtctggaagtggagaaccagagcctgcgtggcgtggtacaggagctgcagcaggccatctccaagctggaggcccagctgaacgtgctggagaagagctcgcctggccaccgggccacggccccgcagacccagcacgtgtctcctatgcgccaagtggagtccccggccaagaagccagcctcaccagcagaggatgacgaggatgatgacatcgacctgtttggcagcgacaatgaggaggaggacaaggaggcggcacagctgcgggaggagcggctacggcagtacgcggagaaggccaagaagcctgcattagtggccaagtcctccatcctgctggatgtcaagccttgggacgatgagacggacatggcccagctggaggcctgtgtgcgctctatcgagctggacgggctggtctgggggacctccaagctgatgcccgtgggctacggtatccggaagctacagattcagtgtgtggtggaggacgacaaggtggggacttacttgctggaggaggagatcactaaatttgaggagcacgtgcagagtgtcgatatcgcagctttcaacaagatctgaagcctgagtgtgtgtatgtgtgcgcgtgcgtaaggccctgccacgattaaagactgagaccggcaaaaaaaaaaaaaaaaaaaaaaaagaaaaaaaaaagaaagaaagaaaagaaaaagaaaaagaaaaaaatgttcccgtgaaagggggccaagaacccagcccagttggcatggctggaggaaggaccaggagatgatgcagtggggaaggtgctatagagaaaactttttcccagaagtatacagcttatttatttatttatttatttatttattttgagacagagttttgctcttgctgcctaggctagagtgcagtggcgcgatcttggctcactgtaacctccacctcccaggttcaagtgattctcccacctcagcttcccgagtagctgggattacaggcgcccaccaccaggcctggctaattttttttttgtatttttagtagagacggggtttggccatgctggccaggctggtttcgaactgctgacctcaggtgatcctcccgcctcggcctctcaaagtgctggcatcacgggcatgagcctccatgcccggccggtaactgtatttttccttctgggcaccccagaatggtggggttgggggcaggttctgggaagagtctgcttccattagggggaaagtggaaaacgtccctaggggagggtggcccgcgcaagggcatcgatcctgcccttgaaccgcatgatccggccccagctgctctttccccctaccctggacgcctcctgtttcctgtctgggcctccccaggcgcccgggcccaaggtgaccgcctttcaactgcaaccgctaagctgcgcccacggcgcactgtgtccgtctctccctcctccctcaatccgggagtgcccttggcagcggacacctcccggatttttccgggaggagaggggaagccgcttctcggcttggcgtgggggcagtggtgcgcggctgggaacctcgctgagcccaagcattggtagggagaccccagcggccagtaaggcggctcctggcgccccctcgggccggagctgtgcgctgcaaggctggatcggagggagggcccaggggcctgaggagtcgctgcctgccggctggcacgaccaagcgggactgcccgggtcccgaaaatacggcttcgggggacacctcaccaagcggctagtggttcagaaccccagtccgacgcgctgctgggcccagtctccgggacgatgacggggacatggctctgaaaaagtgccagggtgcgctcagtagaacccagcacccagaatggccccccagagagcggggccgggtctagggaagccctcttccaagaagtcccgtgccctgaggtgactgggcgcgctagttgatgaaactgagtgccccaccgaggcgcccctgtcccgagggcggggccagggcggggcgggagtcctcctggcaggtgccgggggcggtgcccggccctgcccccgggggccgttcctggaggccagaggcgggtcagagaagccgccggtgcgggcgacgccttggaacccacggccgccactgccgccacaggtgcctcacagtgccctctgtcctcgctctgggaatcaaaaccccggttgggaactgaggcttccgaactgcttccaaccctggacacgaaggcccccaccggccggagaacgaaaccctggggtcgtctgaagaggagggccaggagtccccagggccagacagcgaagccccagagctgctgcggagctgaacaccgaggtccccaagccctccgcaaaggacgtggagatcctggagcaagagagcgaagtcctcgagccatcagtcgagcaggacgcagagagccccgggctgtccacagctgcgggctttgagagtcctgagccaggcagagacgaccctgggccgtccgaagcgcaaagggcggaggtccaggggcagcatccccctccaggccctaagacctcctcctccaggtcaggctcggaagccccccacctgcgttttccgccgtgccccgaggctccccagcgtcccccggaggagcggttcatggagacgcccatcgagcgcgaaatccgccgcagctgcgaacgcgaggagagcctgcgccggagccggggcctgagcccgggccgcgcaggccgtgaactcgtcgagctgcgcgtgcggccggtgctcaacctgccgggtcctggccccgcgctcccgcgcgccctggagcgggcgcgggcgggcgcgcagatgcagcgggacatcgagcgggaggcccaccggcaggcggcgctggcgcgccccgcggtccccgagccgcgcgcccggtcgccgccgcagccgctgggcgaactcaagcgcttcttcgaggccgcggcggggagcggctcctcggcgggggcgggggacggcgcgggcccgcagaggctgccagagcctgggggacggccgcgctcggccgtgcagggcgggtgccgggtgctgggcagcgccccgccgcctttcactccgtcactgctggagcaggaggtgcgcgccgtgcgcgagcgcgagcaggaactgcagcgccagcggcgcagcgtctatggcaccgcggagttcaaggagcctacgccgagcctcaccggtaagccgcgggcgtagcaacgccgggacccccagggttccagccgcccccaccgattgcccaacttcagtggcccctcctgtggccctccgattctcggggtctctccctccaagctcccagaccccctctcaattttgtctcttgcctaccccttctggagctccattactcgctgtgatccacccctccaccgggagtgatggactctctgatccacaccacccaggctgcgcgggggtgggggcattccagatgtcttcctttttgtcgggttccagggaaccctgactgggttctggcactcctgggtcctccctctgaattttcgggctcctgcttctccattctgggttcacctccctcctccctcgggttcctgggtgcctggagttgaatggaggctttcatggggaggcggagggtgaacgcctgtgtgtgtttaaggggtgcggccggcctttcatcctggctgccgccagctggtgagctgagcgccccttcccccgcagcgagcaggggcgacggaaagttggtggtgatctggcccccccgcagaaaggtctcggagaacggcctggagcaggtgggagcccccttacccgtgtgcctctagcgcttgtcggtccccccacccctccggtgccaggacgcttggtggggaaaagtgcatcctccctggagggccactctggtcagaactcagtctgggacgcatccccggggtgaagaggagacggtggtcttgaggcccaaaccgccaccccgagcctggatgcagtgcgcaggtccctgaggccggccttccttctggtcctctgtccccaggaggagcgcaaaccttgaggtttgaaaaggctgggacccccggccggaagtaacgtacgcgtcagaggaacagggcggggggcgtctagcattaggcctggagaagggtcggctctctgcattggggaagatgaaatcgacttgcctttgtgaaattgaccagccccctctataaaacttacagtcccccattgggaaactgaccaccacccacaactccgccagtgaaactgcccagcccttctctgcctaattgcaaactgaactaccctctcccttgactgttaagagggccggagttaccgcctcgattgccccactccccccacccccaataaagcctcttctttcagggcactgcagcctgtttttttctgggtcctcttcgtctggggtggggcgggagcacggcgggccgagggaggcccgagaaaaccccaagaggtgcgggccggaatgcgggaatgcgcccttaccgccctgctctggggctgcccgcctcccccggcacggccagacacggcctggcccaggtcctaccgccccctggcggcccgggcgcaaaatgtggcgcgcttaccgagttcacaccctctcgtttccaggcttcctcgtcaacatttattggtgccaacgatgtgccctgcgctgggcactggctagacagtggtgataagaggctgttcctaccctgggaacgtaaacaatagctactaaaaaaaagaggtggtgagggttcaggcttctcaacattattagttcctaatgatcaccgttcttcttgacctcatgggtcctcactatgagacgtgctcattcgtggtgttgggtcaagagtttctgctttccaaaagcatccgtggccgggcgcggtggctcacgcctgtaatcccagcactttgggaggccgacgtgggtggatcagttgaggccaggaattggagacgagcctggccaacacggtgaaaccccgtctctactaaaaatacaaaatattagccgggcgtggtggtgcatgtctgtaatccagctactcaggaggctgaggcatgagaatcacttgaacccaggaggcggaggttgcagtgagccaagaacgggccactgcactccagcctgggtgacacagtgagactctgcctcaaaaaaataaaaaaggcaactgaaacctggcttttaagagagaaatctgcatttttatgattgtgactatttaggaaaaacttttttttttttttgagacagttttgctctgtcacccaggctggagtgcagtggtgcgatctcagctcactacaacctttgcctcctgggctcaagcaattctcctgcctaagcctcccgagtagctggaattacaggtgcacatcaccacaccggctaatttattgtatttttagtagagatgggttttcaccatgttgtccaggctggtcttgaactcctggcctcaagtgatctgccggcctcagcctcccagttttttctaggcgccctgcctagaaaaaacttttaaagttgtgcgggaggagaggaaggaaggaagttggcaagcaacaactgtttgcaatagggcctgtggctgtcaatttgcaagctctggttaatttctctcccctggatgggggttcaagagggtgggtgaacaccctaaattgtctctaaaactgtatctgcacagttaacattctgggactatttttacagtgtcttagaagtgcactgagggcctggcgcggtggctcacgcctgtaatcccagcactttgggaggccaaagcaggtggatcacgaggtcaggagatcaagaccatcctggctaatatggtgaaaccccatctctactaaaaatacaaaaaaaaaaaaaaaaattagccgggcgtggtggtgggtgcctgtagtcccagctactcaggaggctgaggcaggagaatggcgtgaacccgggaggtggaggttgcaatgacccgagattgcaccactgcactctagcctgggtgacagaacaagactccatattaaaaaaaaaaaaaagaagtgcactgaggaccagacatggtgactcatgcctgtaattctagcactttgggaggccaaggcaggaggattgcttgatcccaggagttcaagaccagcttgggcaacatagcgagacactgccccaccccatctctacaaaaaattaaccgggtgtggtggcatgtgcctgtggtcccagctactctggaagcttagcaggagatcgcctgagcctgggaggttgaggctacagtgagctatgattgaaccactgcactccagcctgggtgagagtgagatctgtaacctaagaaaaaaaaaaaattcactaagaccagaaaaggggagacccaggaagtttaaatttaaaaatgttttcaattttggagacaagtcttgttctgtcacgcaggctgcagtgcagtggcatgatcacagcttactgtaaccttgatctcctgggctcaagtgatcctcctgcctcagcctcctgagtagctgggactacaggtgtgaaccaccacacccaacccaggaacattttagaatcgctgtttcaactcttggctcttgagatcgtgtcactgcactccagcctgggtgacagagcgaaactctgtcttaaacaaaaacaaattcttggctctgtccaactctgtctcttgtataggggcatcaaatgtctagtgaaatccatatgcataaaatacagagaggtcatgctgatacaaggctgcacccaagagcagctcagcccatgaagggctcatcagctgaccccatcctcagcccagtgaccccatcctcagcatacttcactgtgactgtgggagctatgtagagaaaggcggagagagcctgggaaggtggaaaatggaaacacctagaggctggtcttaatttccagcaggggagccaagaactaagtatgtcatgagtggacaggggccgggcatggtggctcatgcctgtaatcccagcactttgggaggccaaggtgggtggatcacctgaggtcaggagtttgagaccagcctggccaacatggtgaaaacccatctccactaaaaatacaaaaattaggcctggtgcagtggctcatgcctgtaatcccagcactttgggaggctaaggcgagtggatcacctgaggtcaggagttcgagatcagcctggccaacatggagaaaccccatctctactaaaaatcaagaaattagccaggcatggtggcgcatgcctgtagtccaagctactcaagagactgaggcaggagaatcacttgaacccaggaggcagaggttgcagtgagccctgagattgcaccactgtactccagcctgggtgacagagcgagactccatctccaaaaaaaaaagagtggacaggactacttaagtatagatgagggattctctaacttttctgaatattaaactcaactgaggcccccatatgtcaagtaaatcagaatgggggaagggcttgacatcagtattttttgaagctcccaggtgattacaatatacagctgagtctgagaaccatgaagtaaatataaaccagcagttctcaatgtagtggcaccaggaccagcagtatccgcaatgcttggggaattgctagacatgcgccttccaggggccaggtgtggtggctcatgcctataatcacagcactttgggaggctgaggtgggataattgcttgagtctgggagttcaagaccagtgtgggcaatatagcaagacaaagtctctaccaaaaaaaaaaaagagagagagaaaaaaaagcactttcttgggtctcatcccagacttaatgatcaaactctccatgtgattctgatgcacactaggaagtttgagaatcaagggtgtagaaagctgctcagcaacaggacccaggaaacaaagcttgtttccttccccttccagtactgtactgtcaccacccacccgaaaccctgtcttaagagacagtggatttgacttaaaggagaccgtctagagctgcttgtggctagtctgaattgagatatgttgtaaatgtgaaatgctagatttcttttcctttttttttttttttttttttttgagatggagtcttgctcttgttgcccaggctggagtgcaatggcacgatctcggctcactgcaacctccatctcctgggctcaagcggttctcctgcctcagcctccagagtagctgagattaccagcacctgccaccatgcccggctaatttttgtagttttagtagagatggggtttcgccatgttggccaggctggtctcaaactcctgacctcatgatctgcctgcctcggcctcccaaagtgctgggattacaggtgtgagccactgcatctggcttttttttttttttttcagatggagtctcgctctgttgcgcaggctggagtgtagtggtgcgatctcggctcactgcaacctccatctcccagatttaagcgagtctcctggctcagcctcttgaatagctgggatcacaggcgcccaccaccacacccaccttttttttttttgttttttttttttgcatttttagtagagacaggattttgccatgttggccaggctggtctcgaactcgtgacctcaagtgacccacctgtctcggcctcccaaagtgctgggattatgggcatgagccaccatgtccggccaagatttctaagacagtacaaaaaaggaaaatacctcaataatttttttacatggattatacattgaaataatattttgggtataacaggttaaataaaatatcacgaaaatgaatctaacctcttaattttttattttttatttttttttgagacggagtctcgctgtgtcacccaggctggaatgcagtggtgcgatctcggctcactgcaagatccacctcccgggttcacgccattctcctgcctcagcctcccgaatggctgggactacaggcgcctgccaccacgcccggctaattttttgtatttttagtagagacggggtttcaccgtgttagccaggatggtctcaatctcctgacctcgtgatccgcctgcctcagcttcccaaagtgctgggattataggcatgagccacggcgcctggccctaacctcttaatttttttatgtggttactagaaaatttgaaactacatacgtgatttgcgtttgcagctcacttgatatttccattggaccccacgagtctaaagaatcttaaaggccgggcagggtggctcatgcctgtaatcccagcactttgggaggccgaagcgggaggatagcttaagccaggagttcgagaccagcctggtcaacataggaagaaccccccccttctctacaataataataataatataataataataataaaataggggcatcgtcgctgcctgtactcccagctgcttaggaggccgaagtgggaggatcacttgaacccaggagttagagtttgcagaagttggaggttccaggattgcgccattgcactccagcctgggtgacagagcaagacccttccctccccccgaaaaacatcttagagccacaggaaaactcacagggactccctcaaagcggtatcagggagcatcaggatttccttgatgtcattcagaccacagctgtggactaaaaaacatccttgatgcagtcagaaattgtcaccagaaatacccatggaagagcaatagtggccgggcgcggtggctcacgcctgtaatcccagcactttgggaggcagaggcgagcggatcacctgaggtcaggagttggagaccagcctggccaacatggcgaaaccccgtctctactagaaatacaaaaactagctgggcctggtggcatcagcctgtaatcccagctactcgtggggctgaggcaagaaaatcacttgagcctgggaagcggaggttgcagtgagccgagatcatgccattgtactccagcctgggcgacaagagcgaaactagtgttggcattcaatattgattcatttcacctctaacgtccttttttatcatctggaaatggaggctaatactatgtgccagggactggaaggtaggtgctttgctcaaaatcataaataagggcagggctctgggtgtctcctctatgaaaatgctgccgggggcggggggaggggaggggaggggaggagaaccaaaagggtccctcttggattaaaggggtataacccgcagctgagtgacacctggctcaggaggacacccttcctccttgcaacgggccacaagtaccgggttgcgatcacaagtacccggttcaggtccaaggtccgccacttgctcgcaggagctttgagcaggtgagttcatttctctcagccagggtctcctctccagtccgagattagagagaggctgagagatcctaagcttggataccgtagggctctcccaccttgtccgcaccccggataccccaagaaagacgacgacctgtccggcccccaagtcccaaaagctggaagagaaaaaaaaagtctaactcgggcccttaggaaactgatcgagggcactttcctggggcgcgtcgggaaaagtagtcttctacgctaaaataaataacttccgggtcaaaatatgggagtgggcgtagccttaagtctcttcctccagtggacgttgaatttccccggtaccctaaacttgcagttttctgggttccggtgttgacgggcaccacttccctttttgcttcatgtgcgcctatgcgcatgcgccaaactctcgtccgcctattggcgaattccaggcttctttcaaaagactacatttcccagaaggccacgcgagtgggtggggcaatcccccgggggaggggcgcggcattcgcagcggacgctgagcctgtgacctctttctttcttttatttaacacaaaactgacgtgtccgcattcagggccccacggccaagccggactcggtgcagacaggtcagctcggcctggccctttggaaggcgaggccgggctgcactgcgagaacgagtgagcccctcccctgccccctattctggagtttggaactgtcaagttccagctcctaccctcttccccaggttcaagacccctgcgctgcccaccccgcaggcccggctgcgctcggaggccgggcctggcctgcctggcccgtgaggatctgcaccagcaggtcggtggccagcgtgggcgtgggctcctcgaagccgatggtcagcagctgctggtagtccccaagcggctgcgggcacaaaatcctggggtgggggggccagggatagacaggcctggacttgagtgccccctgcccctcgggagtccctccctttgagtgagaggctcaggtgaaagaggctttgtttcagctgcgggtgggaaaaacccccgggggaaacttgtttccttgttgatcagagacttagtaatggctcctagaggctgaataactggtcctgacctgtccattcgctctgctagctgtgtgtccttgggcaggtaacaacttctctgagcaccctgttttctttgttaaatggggccaatagcatagatctccatgggttgttactggggtctgcatgaagtgcttttcagggcacaataaaatgctatcactactaagggaagcaaagtgtttgggaaggtggattgtctttggtggggttctgcctccccctccagctcccaggcccacgttgctattgccctagctcctaccatgaataaaggtcatcctcggctggtcctaggggcacccatcggccgatggaccacagcttctggatctgtgggcacgaattggctggactctggcctgtgtcttcccaagtatctcgatagcacagaaagtagctaggaggggagggagctgtaattagaagtgatcagcttcctagctacttctgttgagggctttaattttggagttgaggtgggaactcatcagaagttgccctgaagttctcaggtaggaatgtgactccaaggccttttctccctgccagcctacttttaagatgagaacttttattttggtgggagggtgggttttaagaaaatagaggtagcctttcaaaagcctttagtttcctggttcacttttttttttttttaagagacagattattgcttccactcagggtggagtgcagtggcacaatcacagctcaccgtagccttgattcctgggctcaagtgctcctcctgcctaagcctcccaagtagctgggactacaggtgccagccatcacgcctggcgaatttctttgttgttgagacagggtcttgccatcttgcccaggctgatctcaaactcttgagctcaagtgatcctcctgcctcggcctcccaaagtgttgggattacaggcgtgagccactgcctcgggccctggctcacttttcactttgctggtgacggtttggagggtcatattggcattcatcatagaaaggggaggactttgatttgggtaagaggacttactaatccacaagggaatcttgtccccgaccaggggcctctggggtggcttccaggtgccagcgcatcttcttatagaggtagcgggggaagcggctggcagtgtaggcggttggggcacagtatctgaagatggagacctcatgggacaggctgatggagaacctcccgcaaaagaaacaggagatgctggcgagacatgagagaatggaggggtgaggctgggccttggactccttcatccccccatctgagtctcctaccattttacctaagggggttcatctcctccaggtccacgaacccaaaggaagcgtacatgaggaccagctgttccaggcgcagggtcagctgttgggagatctctaacagctgcatacaagaggggggtacagtgagatcagctggcctgcgaggagtgggcctccccctccaccatccccacaggctcagagctgcgagaagaaaggggcgtggggtctaagaaacctccacacaccccctttcggaccagctcctgcaggggtccatagatggggggtatgcttctcgcggctgcctccaggtacaggaagtagggctcacacatctgtaagaaggtgggcatggccttggccagctgctccttctgtacttggtctctgctgaaggaagaagggggcctttgcctggaatccctcacaacccctccccaccccgcagttttccccattctactcaatcccaacctgtatccctggctttgacccattagaaaagcccccagtttcaggtcttttctgaacatctttctggtttacctgcatcaaacccatttggaacacttgttaaagtgctgacacctgagtctcacaacacttaggacccagagcttcctgcagggtctgggcgcagtggctcacgcctgcaatcctagagttttgggaggctgaggctggaggattgcttgaggccaggagttccagacaagcctaggcaacatagcaagaacccatctctacacaaaaataattagctgggcatggtggcacctgtagtcccagttacccaggaggtggaggtgggaagattgcttgagaccaggagttcgagggtgcagtgagctatgactgccccactgcactccagcttgggtgacagagcgagaccctgtctcattaaaaaaaaaaaaacagcctcatgagaatccctcgaacctgggaggcggaggttgcagtgagctgagttcgccccactgcactccagcctaggtgacagagcaagactccatttcaaaaaaacacataacaacaaaacaaaacaaaaaaacccagcctcgggtaggcgcggtggctcacgtctgtaattccagcactttgggaggccaaggcgggtggatcatgaggtcaggagctcaagaccagtctggccaagatggtgaaactctgtctctactaagaaaagaaaaaaattagccgggcaacacatgttggtgggcgcctgtaatcccagctactcgggaggctgaggcagagaattgcttcaatccgggaggcggaggttgcagtgagctgagattgcaccactgcactccagcctgggcgacagagtgagactccatctcaaaaacaaacacgcaaacaaaacccaacccagcctcctaggaaattccaatggacactgaaattgagagtcacagggaaacctggtctgggaatcacattatcctttggagtctcaaactgatgtcctgcaggccaagtttggctcaggtgggtcttgtttagccagcacagggctcaaaatgtaagacagcacttaaaaactgggagaaaaagtcctagagacttgacaaccccaggcccacactgccacgacagtaatagcagccatcccctacccgcaattctacagtcttcctcattctcttaaactggattctaatatgctagcttcttccactgtctccctctggctcctagcgcttgtaattttgcgaccctggtgtgtgtcacccatcctgtcgcctcccctccaagtctccttacccatggggacctgggaccctgtccagcatcacctgtagagcaagtagctctggaaatcatctgccttcttcagtaggtagcgcagctgttgggtgatggggctgaacaaagtgtccagggataggcggggaggtgctggcccaggccgggggaccagaggtttgggggaagacgtggaggcccgggcctcagccagccgcccctcggcatcttcaggatccggctcagatgggttcccaggcctgccagggggcgtcgacctggaggggtctccgcagggcggcgtcccaggttccaaggcgtctggaggcggtgtttctccagggtccagggggagcgacccctcgaaccactgctctgtagccatggtagggccggggggcgggaacctgagctctttaagcttccgctgctgctcaggttggccgcgggttcgaccccgccccgggagcctccgactggcccctgccttgacctctccaccggagccgcgccgccgcgccgggggccgttcgcctcttttgaatttcaacacgcgggaggggcgcgcctctccagtccgcgcgcctgcggccccctacccctgcacacgcgccgcacgcgctccaggaacctggcggtggggagggacccgcctagggaggtggcctctggccgtgtcctgggggtgtggctagggccgggacctttatctctcgaggtggattcctagagtggaggggtctctaaacgtgtctccaacccctcaacccggcacaggtatatggaatgaggccgcccaggccccagcccctcactcccagaacgctttttgttgttaaaacatttttttaatttaaaatttttagagatgggggcccatgttgcccaggttggtctcaaactcctggactcaagcgatcctcccgtgtcggtctcctaaagtgcccagcctctttttttctttaaaaacaaaaaacaactctaatgagttgagaaactgccttagaacttagtagggactacttagaacttagtagggactttggatgtagtaactctggcgactactactaacaataatttttaaaaatcttcaggctggacttggtggctcatgtctgtaatcctgacactttaggaggctgaagcgggaggactgcttgaggccaggagttcaagaccagcctaagccacatagcaagaccctgtctatacaaaaaccaaaatattagttgggtgttgtctgaggcatgagaatcacttgtacccaaaagttcgaggctgtcaccacagttatgattgcaccagtacactctagcctgagtgacagagcaagactctgtcttgaaacaaaatcttcacttggaaatcttctatctcatggtctcatctgatggcccagaaggaattttctgttgttttaatgaagaggaccatgaggtctggagacactactatggtccaagaacagatccctgccccaatatttgtagtggattctttgcagtagacaaaggctgacaggtttatagtttttaatgtacattatgtcaaatacgctaattatatttaaagactctgagtgaagaactcagacaggtgtcagatgccaccctgtgtgacccggggcagacagcatctctgtgccgggccagctgcctcttctgtaaggtgggattttatgagttttttgtcttatggggacttgggaggacagttgaggaaatgcttataaacccaaggacttaactgctagccattcaacaatatttgaggccaggcatggtggctcacgcttgtaatcccaggcagaattgcttggctgggagttcgaggccaacctggccaacaaagtgcataccctcatctccacacacacacaaagatttttttttgagacagagtctcactttgtcacccaggctggagtgcagtggcacgatcttggctcactgcaccctccgcctcccaggtgtaagcaatcctctgcctcagcctcctgaatagctaggattacaggcacccaccaccacgcccagctaatttttttttatatttttagtagagacagggtttcatcatcttggccaggctgatcttgaactcctgacctcatgatccacccacctcggcctcccaaagtgctgggattacaggcatgagccactgtgcccggacaaaaatttttaaaagttagcccggcatggcagagtgcacctgtagtcccagctactcaggaggctgaggtgggaggatcacttcagcccaggagtttgaggctacaatgagctatgatagcaccactgcactccagcctgggtgaaagaatgaaacctgtctaaacgaaaaacaaaaattgagcacctgctgtgtgcctagctctgttctggacacggacacggtgagattacagaagaaaaaaaagcaaatattcccaccttcctggagcaattattgttatacatggctgtgaggcagctataattcattgtttctgtttttctccctccccaaacaattctgtcctaacctgaggctctcttaggaggctctttagtgccctctccccaccccattcataaaatggactccgtggcttttttttccctttttctttttttaaaattttatttaaaaaaccttcggtgcaatattaaaaagcaatacagccagctggagcgacaatcaacagaaagaaaagagggaggagagaaaaggcccgaggaaccccaacccagctagtcccctaggggctggaggccaggggcagactgagaaggggggcatgggtggtaggggagggaggaaagaccacccaccaaaataaacaggcagatccaaacatttatacaggaaacatctggctgaacggaagaggatcttggggagatgagaagccccccacatttcattttttttttcctaaaatgtcctggactgggtggggagggtcagccacctggggtttaaggagcaatcccctccccacaccgacgtgctgaggagcagatgtgtgtgagacagacacaaggggcaaagataaggacaagagggtgccctctccttggaatctgttatgagggctgagggtgtccccgtccagctcctggactctgggggatcttgggtgagatgggggccggaatgggctggggcaggggtgaggctgggcgctcagcctaagaagccatcggggtcatcatcctcaaagtggccttgctgaagcaccttgatgtggtgctcgtagattttcagggctggcccgaggcggatggacaggccggtgagcacatctgtgcgctgcatgagcagcaaagatttgccatcaatttcctgggtgggacaggaacagagagagccgggatcagggcacatcccagggaggccctctgtgtctgtcagtgtgtagtcctgggctggaaactcacctgctcttggaaagctgtcgcctgctccgggaatccagcctcagtaaaatattcgacgacatccatcacggtccactcgacgggatcagatggcttctctttgcgcccgggactgcatcaaaacaaacagacaccagtgaacacggatgtctctctggctgtaccacacacctgagcagcacccccatgtctccaataccccaacttacggacagccaaagggggtcccgtcggccccaggtagggctggtttgcctgggggcaaaggcacgggggacggggagtctggcccggtggcaacagaagctgggaaggaaaaaaacacctgtctttggctttgtcttcgggctgagttcctctccacctagcactcttccccacccagagggatccttacctgttcccccttccttgttcatggctgccatggagaacacctggcgggtgccgctgcccggggctggcccccgcccttcatcctggccctggtgcggtccgcagggggtccactccttgaccctctccttggcactctgaggtccccgctcgccgttaagctggtggtgctgggcacctgcaggacggtcactctcgggcacttcagagccctctgacacatcatcttcttcatcttcatcttcatcatcatcttcttcctcttctttctcaagtactcgctcttctccacctctctggagccgaggagagaagcatgcaaaattagtagctgttctaatcccagaccctgactgtggcgtccgggcggtggggaggaggaaccgattccacctttaagaacaatacggactaacttttacgcattcactccgtgccaggctctgtgttaactaaagccctcgacaaccaaatcttactaaactcgctcaacaaccccaaggggtcgctactgttattaaaccgcgtttacagcggaggaaactgaggctccgggagattcaatcacttgccaaggtcaccacgcaccgagcccgcaggaaacgcgcgcaaagccccagccacccgccacccagttcctcccgggactcgcgcccccgccaccaacttcgcccgcacctgcccaccgcgcggcgcccccgctccccggcgcgctcaccttgctgcgagacgggcgggcgctggcggccggcggcgcccgtccgggcctgtccccgcggggcagcgcaagcgctccgagacgggtgcgctccagacggcctcgagccgccgcctcctcctccagcagcccctgcacgcggccgcgggttaggcgaccgccggcgccgccgctgcccccgaggtagcgcacgacttcccgcaggctcacgggccgcgccgcgccgccggcccgcaccgcgcccccctccggcggcggctgtggctgcggcggcggcggctgctgctgctgtggcggcgccggcggggccggcggggtggctccgcgccggggcggctggacgcgcgccgcgttgcggtacgagatgctccccttgtagctgacccggagcacggcgcgctgctggatcagtttctcgagctcggcgcgcgtgcgctccggctccgggccgtgccgccgccgcaccatccggcagatgcgctccaggtccggccgcgccttgcgcgagcgcagcgagtcgatggtgtccaggatccactcttggtagtgcggggaagcggcggacgacgaggcggcggccgccgtggtggcggccgccgccgtctccggcgggggtagggccgggggccccgccatgcctcccgcccggcccggctgcaccgtgcgcgctgcctccctcccagcgcggcgcccccctccccggctcccctccctccgccgctgcccgcctcctccgcctccccccccggggggcgcagcgcctcggcggagcggcggcggcgctgctgtttctttgcaaaaaaaaaaaaaaaaaaaagagagagagagggagagagagagagaggaaaaaacagtgagagagaaagaaaagagagaaaaaaatatgcacacactcactcactcgcacgcacgcacacacagacccgcttctgctgggcgcgcgcggggccggggatgcgagggggaggaggggagcgcggcgcggccggcccctccccgccgccgccgccgccgcacgcgcgccctgcgcccgggacactccggccccccttccttccctccctccctcctccccgccgcccgccttcctccctcccacccccacgcgcccgcttttaaggtggagcccgggccccccgcccgccccctttaccctgcgctctcgctcactccggctcgctccggcccccccttacaactcccgcgcgctttttaaggaggcgccgcggagttggcccggggcgggggcgggggaaagcggcgggcgggggagggggaggggagtgccggggggagtggagagggggcgggcagggcgggcgggcggcgctcggccgccctccagccattgggcgcgggacccagacgtccccggcgcccagcccccctctccacgcctctccagcgcgctccgctctcgggaccgcacttaccgggaactcgccgcccgcgggccggggctgccgcgctcgcagggtgctgcggggaccctcctgctgccgccgcccccgcgtccctcaggcgcgcctggcccggcgctgaggatgcgggaaggggggcgcgcaccctctcccccttctactccccctgccagggccgcccccgccgccgctcggcctcctggcgcgccagccccagcgcctccctagagcgccctctcggtcccgggctggacgccgagggggcgcgccgcagatttggggaccccgaatctggggtcaaagggcagtttgacgctcgtttctcctgcggggccgaaggagtgccggaatttcagctaaaccctggttacaaggacttcaagccaggacctgatcggcctgcacgctggggtccgaaattccctttccaaccccctgggggtgtgtgggtgggtgatcgaagtcgagaacaccagcgacactttttttttaaacaaaactttattggtaatagttttcaaatatgtttacaacagcacactgttcaagaggaagtctcgtccttcgcagcacacaggttgaatcgcccccgcacccacccggggccccaccccaggcctgagaactcctcctgggatggggagaagttatgagagggggaaatacggggatgaatggggtggctccccagcggctccccacttttctattacgagagaaaaaagcacaaatgagaaagtgggggagaggtgatggacagctgacagctaagctggaggaggggcgcccaggatgggggaggcggaagctggtgggtgagtaaaacaggcagcccctccccagcagctctagccttgaaccccgggccgtggcttggggggacttggcctcttctgttcccttttgcagggatgccctccccactcagctgagggaaggctggacgttaaaatctagcggagaataaaattaaggagttggggggaaacgctgctgggaggaaagacttgggcttggggctccccctctgtctttttgggggatgactcctctttggcagggagaggggcagctgctttgtctggctttcaaagcccaagggtgaagacaggtctgttggggaaaaagagagcggaggcttcctaaaggggcctagaccctcgcaggattggcagagaggattccccggggaggggcccaggggagattagcagcggggaggttcaaaccccagcgcctccctttccaaagtcagtctgcttctctttaaaatggatttgaggaatggggggacatgggaggggtgggagtagaggaaggagggagggaggcactggtggaacttaaataagattttaaattgttgtttttttaaaaaaattctagcaagcaacccactgaacatgtcactaaaaatctctccttcccaggcaggattactccgaaaggaaggttggcgcttcgttcatttgcccttagcaagtggggcctgtggttgggtgggatgggggtgtgggtgggggctggagttaagcgtgagcccctctttccataccctgtccctggatacaccagcaagacctggtctgactggagttgagaaactcgtttaaaacaggcagaagtgggctgggagggctgaggggctggggggctgtggggaaagaggaagggaaaagtgggagagggggcaggagggtgaaggggatgagggggagcagctggtgtttctgtccctctgattatctgggcttcctgctccccctaaccctggagggtggggtgggggtgaaattagatgcaaggaactctggggccctctggctgttcaatccaaccctcccacccccccgaccaaaaaaaagaaaaaagaaaaaagaaaacccatgggggcacaggcatgcccctaaaactcagaaaactccttgccacacttctcattgatggagacccggatttcttcttcctcatagtcgtcaaagttactcgtatccccagggcctttaaactttggtatgaagggagcttccacctggagagggatcaagaatcacccagacctcagcattcaacataatcattattacaacaataaatgcgaatggcctaacattcaagagatatttactctgactcaggcctgtgcttaccattaggttatggattcctcttaacagcccgaaactcttaatgtagcaactcatcaaaggggaaattacttcccagagagaggcatctgttgcacaaggtcatggaatggccaaatgaccccagaatcccatttctagaccccactgctctaagctctctactctaggttgctcctgaacctgtgttctcttctctatttctctattggctgtcctccctgactcttggcctgctcccaaaccctcagcaggcttaaggaggggaggcccaccttcctctggtagatggcaatccagtcagttgtggcaaaccacttgtggttcttgatatcgttgaccccattcttgaggttcccaaagcgcttggtgagatctacctgcaggaggttccgcagcaggtccttcaagtcagagctgaagtgggaagggaagcgcacctggaggaaggggtacaaggacagggtgggaagctggtctggaacttgggaagcccatgatgcttctttctccatccaacggtcctactgggtgtgggcctccaaagcagagtgcctgccagcatcttgtaaaacagctccttgagcctaccctacagtttccaatttaggaagtctgatactgtggcctgagaatctgcatttctttaaaaactttaaaaattcaagagttagttattttaagaagtttttgtagagacagggtctcactacgttgcccaggctggtcttgaacttctaggctcaagcgatcctcctgctttggcctcccaaagtgctaggattataggcgtgagccaccacacccagcaagaatctgcatttctttttttgaaaaaaaaaaaaaaaaaaaaaaaaaaatagcctcactctgtagcccaggctggagtgcagtggtgcgatctgggctcactgcaacctccgcctcctgggttcaaggaattctcctgtctcagcctcctgagtagctgggattacaggctcacgccaagacacctggctaatttttgtatttttagtagagacggggtttcaccatattggtcaggctggtcttgaactcttgaccttaggtgatccacctgccttggcctcccaaagtgttgggattacaggtgtgagccaccgtgcctggcccaagaatctgcatttctaacaaattccccagcaatggtgctgctggaaaggggtcccttttaagaaccattgctctaaggcaagtgctatgatgatttccatttcagagaaggggaaactgaggcttgggttaaacagctcttcctaggtcacattgaggtgtgtgatggggcaattccatctcaggtctactggactctagaacttgcattctcagctgctgctgctgctgcttaaggcatctctgctggggtctggagacttctgaaatattcttgcttatgacaaactttttctctcctctctttctgcatagctaaggctcttccgttctttaaagcccagctcaactcttcttgaaagttttccccaaaccctctgagcccacgccttgtatgcaagtcatcactggagttatagttgcaagaaacgacttcttgttcctgctgtgcctcttacacgctgtgtgaccttggccatggcccttaacctctctgggcctgcgcatgcctctcagatgtggggcagatatgccagggctgcacgagggagataataccactgacggtgcgggggaactagaaaatgctacaaagaagggagtcatgtgcatcttctcctgtgggatcttctgtgtttttttctttcttttttttcccactctgggacatttttttttctttttttcttttttttttttgagatggagtcttgctctgttgcccaggctggagtgcagtggcacaatctcagctcactgcaacctctgcctcccggtttcaagtgattctcctgcctcagactcctgagtagctgggattacaggtgtgtgccaccatatccggctaatttttgtatttttagtagagacggggtttcaccatgttggtcaggctggtcttaaactcctgacctcgtgatccgcccgcctcggcctcccaaagtgctgggattacaggcgtgagccaccacacccggccaactctgggccattttcttggcagtttcttttggtccggtggcagatgcctcatctttccctttttttgagacagagtcttgctctgtcacccaggctgaagtgcagtggcgcaatctcggctcactacaacctctgtctcccgggttcaagcagttctctgcctcagcctcccgagtagctgggattacaggcacccgccaccacgcccagctaatttttgtatttttagtagagacagggtttcaccatgttagccaggctggtcttgaactcctgacctcgtgatccacctgccttggcctcccaaaatgctgggattataggtgtgagccaccgcgcctggccttcatctttctcttttagtgatgctatgtgtccagctggggcaccccacttgcctgaatttttttaaaagacagggtctggctctgtgacccaggctagactgcagtgatgcaatcacagctcacagctcacttctgggctcaagcgatcctcctgcctcaccctcccgatgagctgggaacacaggggtgcaccatcacgcccagctaatttttagttttttttttttttttttttttttgagacagagtcctgccctgttgcccaggctggagtacaatggtgtgatcttggctcactgcaacctccgcctcctgggttcaagtgattctcctgcctcagcctcccaagtagctgggattacaggcgcccaccactatacccagctaattttttttgtgtgtgtttttagtagagacggagtttcaccatgttagtcaggctggtctcgaactcccgacctcaggtgatctgcccgccttggcttcccacagtgctgggattacaggtgtaagccaccgcgcccggccagtttgtttttttttttttttttttagagatggggtctggctatgttgcccaggctggtctggaactcctggcctcaagcctccacttcccaaggtgctggcattacaggtgtgagccattgtacccagccccaaagtttcaaagccagtcggtggcagagctgggactggggcccaggctgagcctgagggtgctcccaccacagtgtcatgactccgggccaaccaaaagctcctgtgtaggagatgctggaccaagtcgggggatggtcgggtcttcccagcaaggtggttgagctgagggcagaggtggggtccccaacctctctccggccatcagtgcctacaatgattgcctacggtgattacctactcaccaaagtgtgatcttggccaagacacatcccttttcccagcctgtttcctcacctctcctacagagggtgccactatctcagggtgtgactgatggggattctggggcctggtggatggtgggcactttgcacctgtcatagatgtgagctgagatggcttcaccacccctcatctgaaccctcagagttaggcaagtctgggtttgggagaggaagcatgggctataaatgctaagtgagggcaatcctgggtgaggctatggacagcacctgggaacaggaaccaaatacattcgtttttctgccttggaatttgcgaaaactcacactaactgggatgaggagcgaaaaggagggtcgtctggcagggcggtttgtgttctgtggccaagatgttcccgtgaggctcgggattttggaagcccatgggattctggaaccgcggggttggggctggacagcaagggggcttgaggtgttggcctcagtgtggccggcgcgtccagcttcaccacctggcctgacttaaggaacttctagattattctgacaacaagcagggctccccagggaataggatgggtgagcagggaacggtctgtttcttccagggctgtgtccccacatccggacctcaccttcccagagacgatcttctcatagatctggatgggctggtctgcgaagaagggcgggtagccagcggccatttcatagataagaacccccagggcccaccagtccacggccttgttgtagccctggagcaagatgggggggcacagggtgaggaggaggcgagagcaggagagcagagccggcctcaggggaaggggagggctggggaggctcctactttgctcaggataatctcaggggccaggtactcaggggtgccgcacaaggtccaagtgcggcccttcacgcgcttggcgaaaccgaagtctgtcacctgtgggcacaagaacaggcagttggcagggaggaagggtccaggccacggcttccccagggctgcccctcgcccggcctggtgggcacctgaatgtagccctgctggtcaatgagcagattctccggcttcaggtccctgtagatgagatccagcgagtgcagatactcaaaggtcaggacgatctgggccgcgtagaaacgggcatggggctcactgatggggacaaatggggaggtgaacgtcagtggtcatgccccaaaatggtccagcaggtggccctgcagagcctaccccagaggaagacacctccagtccagccgtcagaaacgcaaggcacctgattcttagatagcccgacatgggaaacagcctgtgggtccatccacaggaaaatggaatcacagactgagctatagtcatacaatggaattccactcaccaccaccaccgccaacaggacagcccatgcatccactcaacaatgtggctgcatttcaaactgattatgttaagcaaaagaagacacaaaagaacatgaatgattccatttatatcatgtccacgcccagacaaaacaaaggcacggtgtttgaagtcagaaaggacaactgcctttggtggggaggtgacgtgtcaagagagggattcggcccggtgcggtggctcacccctgtaatcccagcattttggggggtcgaggtgggaagatcgcttgagcccaggagttcgagaccagcctgggcaatataggcaagacctcacctctgtatgtatgtagatatgtgtgtgtgtgtgtatatatatatatatatttttttttgattaatttattttttttaagacagtctcgctctcttgcccaggctggagtgcaatggcataatctcggctcactgcaacctttgcctcctggaaacaagtgattctcttgcctcagcctcctgagtagctgggattacaggtgtgcaccaccacgcccggctaatttttatatttttagtagagacggggtttcaccatgttggtcaggctggtctcgaactcctgaccttgtgattcgcccgcctcggcctcccaaagtgctgggattacaggcgtgagccatggcacccggcctccacctctgtatgttattggaaaaaaaaaaaaaaaaaaaagggattcaagggaattttcttaggtgatagaaaagttccatatactgttttgggtggaggttaggtagctatatacaactgtcaaaacttgtagcatggaacattgaagaactgtgcattttgttgtatgtaaagtgaatctatagttatctatctaaaatacaactacaaggccagcgcggtggcccatgcctgtaatcccagcatcttgagaggccaaggcggggggggcggatcacctgaggtcaggagttcgagaccagcctggccaacatggtgaaaccccatctctactaaaaatacaaaaattagccaggcaagggggcatgcacctgtagtcccagctacttgggaggctgagacaagagaatcacttgaacccgggaggcagagtttgcatggagccgagatcgtgccactgcactccagcctgggtgacaagagtgaaactctgtctcaaaaaataaaatcaaataaaactacgtatgtaaacttataagttaataagacaaatttataagttaaaaattttttttttctttcagcagggtctgactgggttacaacccagtctggactgcagcagcgtgatcacggcttatgcagtctttttttttttttgcatatgttgaaccagccttgcatcctagggatgaaggtgggctcatgcagtcttgacctcccagactcaggtgatcttcccacctcagcctccccaggagctgggactacaggaatgtgccaccacacctgactttttttttttttttttgtatttttttgtagagatggggtcttgctatgtaaggctggtctcaaattcctgggctctagcaatctgcccaccttggcctccccaagtgggattatagggcatgagccacagtacccagcctgtatcttaaacttacaaatttctgtatatagatttattttatgtataaaaatatatattaaaatctacacatataaaactgtccacctatataaaataaaataatagtataatttttattttatttttttgagacggagtctcgctctgtcacccaggctggaagtgcagtggcgcgatctcggctcactgcaaactccgcctcccgggttcacgccattctgcctcagcctcccgagtagctgggactataggcgcccgccatcacacccggctaatttttttgtatttttttagtagagacggggtttcaccatgttaaccaggatggtcttgatctcctgacctcgtgatccgcccgcctcggcctcccaaagttctaggattacaggcacgagccactgcgcccagccaattttttttttttaaaagagacaaaacctcactatgcagcccaggctggtctcaaattcttgagctcaaatgatcttctcacctcagcctcaggactagtgggactacagatgcatgccaccttttggggctcaaaaaatgcacaaaatcaacaacttcaatttttttttttgagacggcatgtcactctctcacccaggctggagtacagtggtgtgatcttggctcactgcaacctctgtctcctgggttcaagtgattctcctgcctcagcctcccaagtagctgggattacaggtgcccaccaccatgcccagctcagttttgtatttttagtggagacagggttttgccatgttggccaggctggtctcaaactcctgacctcaggtgatctgcccaccttggcctcccaaagtgctgggattactggtgagaaccaccgtgcctggcagcaacttcagtttggacacctaagttgccctgtttgctctgttttgttttgtggtggttgaaatatcacatattcctcagcagaggggaaacagaaacccacagggtctgggagaccacctgcatgttgaagtatgctggactcctctgcattcccagggggcttggtcgtgcactgccacctgtggacaccctgacagcctgatgtgatggggggtggcccgcttacctgaaccttccgatccgccgtaggtgtgagaacatctccccgccgggcacgtactccatgaccatgtataagtttgagttgtcctgtgggaagcagtggctggtcaagggcccacccctgagacttggacccgatctgaaggccttgggggcctccccggctggtgttcaaacattaaatgacaacagcgatcctggctccctgtaggaatcatgttctacaggggcgacccttatcctgctgttaatgggtgaaagtgagggctggctcagaggtatgtcaggacctggttagcctgccttggctggagagagaactctgtagtaccttgctctgggagcttgagtaaggctctgaggccacagttttgtcatctgtaaaatgggatcatgataggctgcagaattagtggggcccagaataaaaaagatggcccctggttaaaaaattattacagagggtcgggtgtggtggctcatgcctgtataatcccagtactttgggaggccaaggtgggtggatcacttgagcctaggagtttgagaccagcctgggcaacatagtgagaccccgtctctgcaaaaatacaaaaattagctgggcatcatggcgtgcacctgtagtctcatactcaggagactgaggtgggaggattgcttgagcctgggaggcaaaggttgtgagctgtaattgcgccactgcactccagcctgggcaacagggtaagaccttatcttaaacaaaacaaaacaaaatggccgggcacggctcacacctgcaatcccagcactttgggaggtcgaggcaggcagatcacctgaggtcaggagttcaagaccagcctgaccaacatggggaaaccctgtctctactaaaaaatacaaaattagccagatgtgatggcacatgcctgtaatcccagctactcgggaggctgaggcagaagaattgcttgaacccaggagtcagaggttgtggtgagctgagatcgcatcattgcactccagcctgggcaacaacagccaaactctgtctcaataaaaaaaataaaaattaggcttggcacagtggctcatgcctgtaatcccagcactttgggaggccaaggcaggcagatcacttgaggtcaggagttcaagaccagcctgagcaacatggcaaaatcctgtctctactaaaaatacaaacataagctgggcatggtggtgggcacctgtaatccccgctactcaggaggctgaggcaggagaattgcttgaacccaggaggcagaggttgtagtgagccaagattgcgccactgctctccagcctgagcaacagagtgagactctgtctcaacaaaaaaaaattattacggatctcaagacagcagcagcagcaaagcgttaaaccaggtgtggggtccctcggagaacaggcccttgtgcttctctgggtcaaacgtccatgaagctggccctgagtggcctttcctgtttctcatgaccacagctttggatggcacccaaaacggctcccaaagggcgctcaagacgtgcctggaactgtcatgacaaccccaccaggctggaactggtatgatccccattttaccatgagaaagctgaggcttggggagataagtctcttgcccggggccacacatcaagaagtactgaactgggaaatgaaccccggctgcctggggcagagtttgtgctcctgggtcaggctcttaccataaaccaggtgctgcttttgagggatgttactgaggttgggtgactcaccaagggtatcgaactacaaactggctggaccaggaactgaacttgggtctaccagagtcccagcctgactcctgtcccctgatctccctcctccagggatcttgttcttccacaaaagagagcagccactgattgtcctcagctccgaccccagccctgggggccagaaggctgggacccaatgcagtgaccccccgcccttggccactgggaccccaccttgaaggagaactcgagtttgacgaggaacggaaagttgacagcttgcaggatgcgcttttcattcagggtgtgttcgatctgtttcagtttcaccacctgggaagggaaggaggggagggcagaaaggagggggaggtgagaggggcctcatttcccctaatgcctggaactagggatgccggagccaggccggttccttcagccagaatcatttgtgtgcctgtggcctgtcgggcccttagctgatgctgaggacacagcatcagggaggctaggggctgcttgtccttgcacggcactaagtccagggcaaagaatacatgggttacccccacagaggtcagagccgtggtggagggtatcttggggttgtggagaagcagcccccaagaagcccatgtaaagtacctggcgtggtctggggaagggggaatcagacagcgctttctggaggaaggggcagctgaactgaaattgaaaagacaggcaggagaagcccaagaggtggggggtttaggacctgccttacccttgtctagaacactccacacagcaacctgaacctcaggctaacagctcctcagccatcagctgtcccctaatagcagatgccatgagcaggcacctggcacccagtctctcactgaatcaggatagaagccctagaggcccatgctgggagtacgccagtttggaagaccagacacagaggggaggtgacttgtccaaggtcacacagctggctgatgtcaggctggtgtgtaacatgtggccagcctggtccctcagtcagctgtcaactgctttgctcacatagctgtgtcctcagagtctatacctgccctacccagttcagtccccattagccacagggggatgctgggcccttgaaatatggctggtcggatggggagccaaattcaaaaattttaagtatctaaaatataaattaaaaaactgacaccagctgggcatggtggctcacgcccgtaatcccagcactttgggaggcccaggcaggtaaatcgcttgagcccaggagtttgagactagcctgggcaatgtagcgagaccccatctctacaaacaacaacaaggacaacaaaagcaattagctgggcatggcacgactatggtcccagcagctccagaggctgaggtgggaggatcatttgagcccaactgcacttcagcctgggcaacagagcaagaccctgtctcaaaaacaaaacaaccaggccgggtacggtggctcacgcctgtaatcccagcactttgagaggccgaggcaggtggatcacgaggtcaggagatcgagaccatcctggctaacatggtgaaaccccgtctctactaaaaacacaaaaaattagccgggtgtggtggcgggcgcctgtagtccctgctactcgggaggctgaggcaggagaatggcatgaacccgggaggtggagctggcagtgagctgagatcacaccactgcagtccagcctgggtggcagagcgagactccgtctcaaaaaaaaaaaaaaaaaaacaacaaccagccaggccaaaatggtgaaaccctgtctctactaaaaatatttaaaaactggccaggtgtggtggctcacgcctgtaatcccagcactttgggaggccgaggccggtggattacaaggtcaggagatggagaccatcctggctaacacggtgaaaccccatctctactaaaaatacaaaaaattagccaggcgtggtggtgggcgcctgtagtcccagctactcaggaggctgaggcagaagaatggcgtgaacccgggaggcagaggttgcagtgagccaagatcgtgccactgcactccagcctgagcgacagagcgagactccatctcaaaaaaaaaaaaaaaaaaaattaaaaaattagctgggcgtggtagccggcgcctgtaattccagctactcaggaggctggagcacaagaatcgcttgaaacccggaggcagaggttgtagtgagctgagatcatgccattgcactccagcctgggcaacaagagcgaaactccatctcaaaaacaaaacaaaacaaaacaaaacaaaaattaaactcttgatgcaggtactggtgactttcaggcatggttggaacaacttgggcatgtgaatctgctttttcaacttccctgctttttcttatctttccaggaaaaatttaccatcagagttgagaactgttgtaagcatacaatagacactggattttaaagatacttcagtacagaaaaaaaggaaatatttccgaagtcatggaggactgggaaaaaaacaaaaggaatgtaaaatgtttcattaatgatattttcacattgataatatatggaaagggtaatactgtagatatactggcttaattaaaacatatcattaggccaggtgtggtggctcacatctgtaatcccagcactttggaaggctgaggcgggcggattacctgaggtcaggagttcgagaccaacctgaccaacatggtgaaaccccaagtctactaaaaatacaaaagttagctgggcgtggtggtggcacccataatcccagctacttgggaagctgaggcaggagaatcacttgaacctgggaggtggaggttgcagtgagctgagatcacgccactgcagtccagcctgggcgacaagagtgagactctgtctcaaaaaaaaaaaaacataaaaaaaagccccaaacatgtcattaaaatgaatttcatgaatgacacctgtttctttcattttctcttttaattacaaactttgggtgtttttttagagatggggtctggctgtgttgtcgaggctggagttgaactcctgggttcaagtgatcctcccacctcagcctgtctagtagctgggactacaggcgtgcgccaccgtgcttggctgtttttactgtttatgatggagcaaacagaaaatttaaaattgcttctgtggctcaggttacatttctgctagttacattgctgctttatagcagtgcctggtataaagtccgatcacaaaaatatttacgggaagaaagtgcacataaacaccacttcccccaagagtgctcttgttctcctcctgttgggctggtgtctgaccctgtgtcacagtgcctggctttgaatccatggccggcctggagagggagctttgggaaggcggcacagggcccttctgacccctggggctggcacattatgggggctcggggaatagtgggtgagcctggcatggtggctcatgcctgtaatccctgtgctttgggaggctgaagtaggagatcacttgaggccaggagttcaagaccagcctgggcaacacagcaagaccccctgtctaaaacaaaaaacaaacaaacaacaaaaaaaaattagccaggcatggtagtgtgcgcttgtagtcccagctactcaggaggatctcttgagctcaggagtttgaggctacagtgagctatgatcacgtcactgcactttcctgcttgggcaacagagcaggatcctgtcccccacaaaaaaaccaagcggccaggcgcggtggctcacgcctgtaatcccagcactttgggaggctgaggcaggtgtatcacctgaggtcaggaattcgaaaccatcctggccaacatggcgaaaacccatctctactaaaaatacaaaaattagctgggtgtggtggcaggcgcctgtaatcccagctactcgggaggctgaggcaggagaatcgcttgaactagggaggtggaggttgcagtgagccgagatcacgccactgtactccagcctgagcgacagagcgagactctgaatcaaaaaaaagcaagtgagtgaacgggtggatagggcactctaaggagtgggcacagtccaggcaaaggcctgacaggcaggccctgagcgaggacaggccacctcaccttctgtttgtcgaggatcttcatggcatagtggttcccggtctccttgtgtttcaccagcatcacccgcccgaaggagcccgtgccgagggtcttgattcgttcaaactgatccaagtgggctgtgttctgtgggcagaggggtcggtaggctcagggcacgccctccccgcggcctgcttggctaaggtctggggcatcccctctgccaccggcagagggggccccggggagcacgtggggtcagcggggtgaggacagggggcggaaaatcaagatggcagagggcacattccttaaggcgggtggcaggggccagatccggccctggcctggggcctggaagctgctggcagctgtgctgggggcaggggcgggccgttgggaggggtggtgggatgggggtgcctggcattgggcagtcaggtgtctccacacaggagcccccatgggcacctagggagcaaatggggagggtctgaagccttctatggggtttctgaaattctagctgtgttgctgggacacagccaggggctgggggttagcagctcacccctccctgggctctgcacccggcagccttacctgagcgggactttcccattttttaagaaaatcttctttggctttggctaagaattctttcactgaaagggagagaggggagagttatacagagacgcccgtctcaccggggtgggttcaggtgatttctggggagatacttggtggaaagtggggtgcagttccaacccagagcctgacctttttctggtgcctctggggccttggctgggccgtggcctgggcctcccttgctacagagaggtgggatccagctgccactccatccaaagtggggtacagagagtctcaggggtcactcgcaggggaacggagggaggtgcccaggcagaccagcccacccccactcgccccagttctgaccgacattccatggccagggccgacgccagccgaggtatttatagccttgggatttggctgttcctctggccccttctctggggaggccgggcctgggatggaggcctcgggggctcgggtagcaggtgcccttggggggctcagctgtcaccttggcccccagctggccctgttcctctccgtggcaatcgcaagggcattgctccagagctggttcaagggaagtctcgcccgatgcccactcctcggccccatggtatcccaaggtgaacatcaccgcctggctaatgttgaaacttccccggcagaccctgtgccggctgctgtctacactgtctcatctgactcactcggcaacctgccttgtatccattgtctccacttaacaacccaggaaacaggcttgaaaacagtcattctcgtctctgctgagacacagcccagcaaagtggctaagggccaggacttggggtcaagatccagttcagagcccagcctggtctctgatgaactctgtgactttgggtaactgatctcacctctctaggcctcagttttcctcatctgtaaagtggggtggttttgaggaatgaatgagttcatcttgacaaagggagttgaacagtggccccgtgtgatgatagtgccagataaatgtcagctattattattttttatttatctatctattgactgattgattgattgattgattgagacggagtctccctctgtcgcccaggctggaatgcagtggcgcaatctccgctcactgcaagctccgcctcccgtgctcacgccattctcctgcctcagcctcctgagtagctgggactacagacgcctgccaccacgcccagagaattttttgtattttttttagtggagacggggtttcaccgtgttagccaggatggtctcgatctcctgacctcgtgatccacccgcctcggcctcccaaagtgctgggattacaggcgtgagccaccatgcccggccaatttattttttttaattattattatttttttttttgagatggagtcccactttgttgcccaggctggagtgcagtggcacaatctcagctcactgcaacctccgcctcccaggttcagatgattctcctgcctcagcctcctgagtagctgggattacagacacctgccaccacgcccagctaattttggtatgtttagtagagacagggttttgccatgttggctaggctggtctcgaactcctgacctcaggtgatctgcccaccttggcctcccaaagtgctgggattacaggcatgagccaccgtgcccagcctattattttctaaattgaggtataaaatatggggagagaggctgggtgaggtggctgacgtctgtaatcccagcactctgggaggccaaggtgggtggatcacaaggtcaggagttcgagaccagcctggccaacatggcgaaaccccatctctactaaaaataaaaaaatgaggccaggcacggtgggtcacacctataatcccagcactttgggaggccaaggcgggtagatcacttgaggtcaggagttcaagaccagcgtggtcaacatggtaaaaccccgtttctactaaaagtacaaaaaaatcagccgggcatggtggcaggagaatcgcttcgacccgggaggcagaagttgcagtgagctgagatcatgccattgcactccagcctaggcgacggggcgagactctgtctccaaaacaaaacaaaaaaattagccaggcgtggtggtgatgtgtgcctgtaatcctagctacctgggaggctgaggcaggagaattgcttgaatccgggagactgaggttgcagtgagccgagattgcaccactgcactccagcctgggtgacagagcaagactcgtctaagaaaaaaaaaagaaaaaagaaaagaaaatatggggagcgatcgggcatggtggctcacgtctataatcccagcactttgggaggccgaggcaggcagatcacttgaggtcaggagtttgaaaccagcctggccaacatggtgaaaccccgtctctactaaaaatacaaaaattagctgggcacggtggcgcatgcctgtaatcccagctatttgggaggctggggcaggaaaatctcttgaacttgggaggcagaggttacagtgagctgagatcatgccactgcactccagcctaggcgacagagtgagactctgtctcaaaaaaaaaaaaaaaaaaaaaaaaaaaaatatatatatatatatatatatatatatatatatacacacacacacacacacacatagggagagccgggaacggtggctcatgcctgtaatcccagtgctttagaaggccgaggttggaggatcgcttgaggcctggaattagagaccagccttggcaacatagcaagacccaatctctacaaaaaataaaacaattaaaaaattagctgagcatagtggcccatgcccgcagtttcagctaagcaggaggctgaggcaggaagattgcttaaagcccaggagattgaggttgcagtgagctatgatcacaccactacactccagcctgagcaagagtgagactctttctcaaaaaaataataatactctgggaggccgagttggggggattgcttgaatacaggaattcgagaccagcctggacaacatcaaaaccctctacaaaaaataaaaacattagccaggtgtggtggtatgcacctgtagtcccagctactcaggaggcagaggtgggaggattgttcaagcccgggacatagagcctgcagtgagccgtgactgagccattacactgcaggctgggtgacagagtgaggccctgtctcaaaaaaaaaagtaataataaaaaaaccccaaaaacaaatataggagatacactgagtgctcaaatcttaaatgcgcagcctgacagattcttgcattatggacttgtccttttaaccaccacctagggctacaagggaccagccccttgctgagtattttctatgcttcgttctcaccctgtggggtgggagctgctgttattcccactgtacagaggagaagactgatcaggtctgaggtcacttgcctgcccccacatcccatgagattaactacttcactgccaactcagccattggtttcagtgctgagtccagtgcaccagggtggccaatgtggacagagctgccttcaaccccctgatgttcctgggtttgctgccaccgaggggccctgtacacttgccctttggcattgctggttatctgcctgccagtaatcccacatggccttgtggggagccacccccactacctgtctccagagctttccctcagcattcagagagaagagccctcatggagctagaaagtggtagatggtggctgggtgcagtggctcacgcctgtaatcccagcactttgggaggctgagacaggcagatcacctgaggttgggagtttgagaccagcctgaccaacatggagaaaccctgtctctactaaaaatacaaaattagctgggcgtggtggcacatgcctgtaatcccagctactcaggaggctgaggcaggagaattgcttgaacccgggaggcagaggttgcagtgggctcagatcgcgccattgcactccagcctggacaacaagagtgaaactctgtctcaaaaaaaaaaaaaagaaagtggtagatggcagatggagagagaccgtggccaagaaggccccacaataaatgaccaggcggagaggggataggcaatgaatggccaggagtcctagatgggtgcctggctgggccaccaactagcccaggggcctgagcctgggggtcacaccaaatccaacactttcactagcagaacctttgtttgagtgttttattttgttttgagatggggtcttgctatgttgcccaggctggtctccaacttctggcctcaatggattcccccaccttagtctcccaaagtgctgggattacgggcatgagccactgtgcctggcttcagtcatagaacctttgtgacagaaaacatcttccttggaaacctccaaataatccacacagaattcagcagtgggtggggagggtggagggtgccctcttgggattctaccttcacccacacaagaaggcagagaggtgccaggcttgaagggaatccaaaaggtctggtccgttttccctttgctcttagcaaaaaggaaagaattgctgaatcctgcacctccccgactcgctgagctcccagcccctggctgtccgctggtgccccacagagtcgctccacagggtgccttgctgttagcatggcccttctctggcctctcaaaggaccagagcgcccaggctctgtcccctctggtgccactagccctgttagcttgtcagatttggggatggggcatgggggaggccagtgccaggaggagcaggcagagagagggatgatgggggggaggggcaggtaacctcaatcaagaggccccacactcacctctgcttcctgtctcttccaggaaagggtagaataaagggtgggtgggatggggtgatctggcggccttctgccccctggccagggaggctcagggtgctggctgtggcttaggcccccggaaggtgcggtgcaggtagcccaggaaacgtacagccaggtgggcccagaggagcagctgcagccacagctggaaggtggtctccaagtccccaccctggctgctgcctgatcccagatccatccccagcccccttgggctctccctggaatcttccttttgctgagaaaccaggaaaacgcagagcctctaagtcagcttccttgggatggcctcaggggaccagggaggaggagctggttgccacagaagcttttaaaggtacctgctccaagctagccaaggtttgcagagggctcccttggcaggaggcaatgggaagattctcccgagggtgtccctctggctggcctgcgtgccccagggcggggcgataaaactaacttccctttccacggacttcactgctcccaggacgccaggccctgccttcctcagtgggcactggactgtgcagaggacagcgcctgatgtgcccagagcagtgcccactgggcagaggggaaagagttaaggttcaggatcaggcaacagccagagactccttaggggctaaagaggccccagagctcccttaattcgctgaaagaacagctggagagaaaggcttggggcggggggcgacaagagccaccctgcctcctcccctgaactccctttcaatgtggaacccccaaatcctgctatcctgagagagaaaatgggtatatctgactcttttgttttgctcctatgcgggggtggagaggggaaaggcatcccgggatgtccttggcctctctcaaaccttgccctgtgcttggctctactctcggccatgaaagtccaaaccggaaacgagcggctaaacccaggggtgggggagggggaggcagccttgaccatcttcctccttctttccagatcccaaaagaagcagagggtcagtggcagcctctttgagtgtgcccggcatccaggacccctgctagcaacaggaagtggcagaggatggtaacccagccagctgctggcctgtacagcctgccgccctgcccacatctcccacacggggggtgccagctctcactctggtccagattccatttgggttcatagggaaaactccttgacaccccttgaaaagccaggaccacagcagaaagcagaaatctagaaactcgccctgggaatggggaattgcaacagcagaatatcaatttgggcaaggggcttggggtctctctcggaaggagcccagccacagaacccccttcctccggacaacaatctcagaccttctgcccttttgaaatctggctgtcctgggaattctggggcaggaatgcccagcctgggctgggccccctactcgaggctggctgattcctccagtggagcctggattccctgctctgggcttacctaaatgacacaactctgagctggaccccaacactggctggaacgacccccattctgagctggaccccaacactgggatggctcatcctacagtctgagctgaaccccaacactgggatggaccactccaccacccctctctgagctggccccctgccgggtggaccatcctcccttgtctgaactgggccaccgatcccctctctcttccccaggccgcacagcccggggctgtacaggaggcgtttccagggccagccaggggttcacatccttcttctcttcgcctgtgccccagaccccgctgcagcccctccctgacttaaggggcagagtgtgcctaggaagttgctatagtaacaggactcagcctcaccatcgctggagttggaagccatcactcagtcctgttctcagggcaccggcactacggtggctgggaaggctcatgagacctgccgtgtctgttcggctgtctgtccccagaaccctgcctgcagggggagctagggagccgtggggtgggagcaggaagagaaacccaacccagaggccactgggtgtggaggagggacagatagggccctccgagtttctgtagacgcggttgcgctaaggggagagctgccttgataagacctcttgggcacccatacaactgccaaggcacagaaggtgtttggccgtcttaggcatccataggatgttacacggcactagttcttcccatctagggtcttcttggggggtgcttttctctctttgccaggatctgcttgtgtcctggggatcgggggctcccttttactagctctgccccttcccctgtgggccagctcccaggggtatcttcagccagtgccagccacgacctgagccccacttggctgtctgacctgggcgcctgccccctggggccgctgctccctctccattcttccaacttggccagagcctgggccttagtcttttttcttggccctctcagctctcccaatggctttgccatctttgggtgtagattcccccaactccactccagggttcattctggatccctggcctcttgggaggaggcggactctgtcctgccctggcacagagatggtaccacaggggactgcaggatgcttaactggtgcctcccaaggcctgggcattttcctgaccccagtcgggccggcgtctggcagatgaaatccaggtgccccctgcaggctggcctggctactgcccctgcccctgccccacccttctaagagggcaaattttgtctaactccatcctctcagaatcagagcgcctcaaagcaaagagggacttccttcctcatcttatttccttctctgggagcctctgggaggaagtacagcttcgggcgtttctcaacgtgtgacatagtcccattggcagaacatgacatgattttcgggatgtttcatttatctagttacactgtatttaatgcgtatcagagaaaatataactggcatggcaatcccatgatttcatttatattattgtttagaatgagctccaagtttacatctgaacacaagtgagtaaaacttttattattttaaattaagaaaatatgatagagtaaaaatctgggaggctgctgaaaaatgtcaaagtcggggaattctggggtccaagaagtttgctggtagatggatctggatgtgaatcctgcctctgtgacatcatctatgtcatggatgtcatttctaccagagggctcctttggaaaatttggataacagcccgttatgaaagtcaccagagtaggtatctctatccgcctggccatttagcctgtggcacagcctagatgcccaataaatagtagctctattttaccatgatcattcattcctgggtgtctgacctgtgctctgagagaatcagtggttccttccagagcctctgatctttttcttgggatcctttttcttgtgtggctttccaccccccaccacatgtgtctgatagccttgaaggttttccaggactgtcatctccccaactttcaactgagctaccgcaatatatagctgcctgcctctaccttccacctcccagctggcctcacctgctgggggcctgactcctccccccccggccaagtcccctccaagctcatgcccagaccttttttggacactacccacctgctcctctgtcatcaggcactcagctacaggcatttccctccccagcccccacccattggtgacatgtcaggcctcttcatgatcgctctgtgactctgagttctgctatttgaatccgtatgggaataaagttccctggctttcatacctttctgggagggggcattcaggaaactcagatgctggggtttgagaccaaaaactggccttccttttcgaccaatagttccgactatttctgggtaagtggacaggggatcccagctgccttccagctttcagactggagtgacaacaatttaagagctgtaaaaattgggaatggggttcaagaccatttctgatggtatttccagatagagaatctctttctctggctggctggaaaagaccaacctaatgtgtgggcaagtgggtgaaacaggtctctctctggctgagccctgggaatgatcagaatcactagacgtcaaagcaaatcactagacgtcacccattactctctttgactgcctcctcctccccagtgctctttctgaccatctcagttagaaccgaatgaacctcgctaaacccagacacttttcatcccaagccaggagtggtggaagaagccccagggactgggtgaatgacggagcctcagttgtgaaacgaccatttattgaggggccctccatggagcctagagctcactgcaagacaggaaatgagagggggctctgccaccacccccttaccccaacgcaggaaagaggatgcaatgaatcccaacaagaccagctcaaacttggctttggaagcactgaagcaattctctacgttcataaacagtctgctaccccagccagggacagacgcttgcttggaggacggagcacaagcagagcagcagaatgacagagtgacaggatgagagaggcagagggacccagaaagatcctgtcccccatgccaagtgacacagaagaaaaaaataatgctggaggtggctctgggaaatgttcagggggcaggatgggtttggaagggggggctgtgctaaggtgaagagggaaagggcaggagaaagatggcgggggctggaggggggaggggtgtggtcagcaagtggccaaggtccctgcgcggtggaggcagacagacctcatcgcattcccaaactggtagaaacctgggtcggggtcaggcagaggatcccataggtgagagaggtgagtgaggaagtggggggattagaatctgggaagaggggccaggaaaggagggggtaggctggtgacaggggcccatgtggggccccagcggtcatacgtgccatggttggcagtgacagctgggggggagcacggtctttgcagcatggggcggccctaggggaaggggacccctacagggggtactctgcgggcccgcgggccccagccttggacaggccggggcaaggggcgctggggggtaggcagagaggatgaggggccccgtagggggaggggccaggcgatgatggacaaggccagggctggcagcgcagggccaagatcggggtcacagcccgggcactcaccgctctcctgctcgctgcccttcttggcggcggcggcgttgcccatcgcggcggcggcggccggggccggtcccggagctgcggcgcggcgggtgctggctgcggccggcggccccggagcgcgctgggcggcggcggcggcggccctcgggctggctgcgctagctgcggcgccgcgacccccgcccagcccctgcttcccgcgtctctccgcgcccgcccgcccgggaacctcagcccaagatctctgccgctgtctgtgacgcccccgcagcccgccgctcattggcctaggccgccctgactgacggctcagcgccgcctcccattggccctcccgcgaccttcccgcgccactataggctctcagcctcgggacacgcaccgcggactctcggccattcactcgctcgcgaggccgcagctgggcgggcagacgcgtccgattggccgagacgctggactgggcccggggtccgccctgcgaggccgccgattggcggaggtgccgggtccgccaagccccccagcagaacgctcagtgtcaatccgggggtgagagggcggggcggagacgcagtctgcgggcccgggccggcggggcggggcggcggaggctggctggcggccgcgcagcgctccgaggctcaggaggcggccccggcgggcgcccggccggccccgcgcgcgccgcagtcccccgcccccgctcagtgcggcagcggctgtcggccagccggagttggcgccgcggcctgcccggcgcagccgctgtccacctgccagcgggggaggggcgcggccggcgcgcgggtcagaggtcgcccggccgccgccggcgtcattcataaggcctggcgctgggcggccgaggccaggcctgcttgggggccaggccgcggggcctcctgggttttcccagccgcactcaggaggatgccgggcccggcgcaaggggtggctgggaaggggcgctcagtgtccacccctttgctgggccctagccctgggctcctgccagtagtaagagctggcacccacttaacgctccttcgcaccacactcccatcgcgtaggtgctaccatcatcactcccattgcacagatgaggaatctggggtacagccaggcagattccctgctcctgttccccgtctgtatttcctgtctgggcaatgcgaagggaacctgccccttccttcaggatcctctttcagtacacacttagcagaggacagtcggggtttcccaactgcgacactactgacggtgaggctggatcattttctgctggggggtgtcttgtgcaccactgggtgttgagcaacatcccccgcctctacccactggatgccagtagcccctcctctatcttcctgctggctgtggcaaccgctgtctcctgacattggtgaatgtgctcttgcggggccgaactgctcctgattgagaagcacttaagagagggtcaggggaggggagaagccaggtcaccccgactcggaagggctagctgggcttaactacaagccgatctgctgcttcgacttgaatagcctccaccttctccagctgctgtctgcccccatgttcccagatcaaccacagttccagggagggagagtcagagcctttctgtgaactatggggaaatggctgaccactccgcctctggatggatagatacatggtaaggtttagtaaaatttaataaaagcattgctgtttgtgtgttgggatcacgatgttaatttcctgtgggtcaagggcaaagtctgaaaaatcactcattataatctatctgcaggacagctggtttaagttttgacaaagaaaaacccctcctggaacctcagtctggaatacaactgtagaaccaattaagactggagtaggaagctggaaagaagacgtgggacagccaacccactggacagggcaagaggccacttctgggggagagtggacaaagttgcttcagtccaccagagacaaaagcacaaacaatcattctaaatgaagtgcttttaattttcagaccaaacatttttaatataaaaacattttgataatatacaaacagcaatcacaacagcatccacatggcagcaaggggaccagggcacagagagggggagcgggctggggagggacagttttcagggtcccagttgcttccctggcttgaaatcaccctggtcctagcagaggacaggttaaggctgccagaggcagagggtccctgaccctggcccggagacagactgcccaggcaggccctctgataccatcttccaaccatggcagcctccaggaaaagccagatccatttaggagataacaggaaggtggctgtgattgacaggaaaggcaacatggttcctcagcatcctgctgatcacacctctgggaggggctgctggattgaagaggacctaagaatcttcctgggagcaggacagaaatgggatctaagtctacctactaactaacattcccgcctgtgacaccagaaagctggagtgggtctgctcagatgtacaggaagagaaaggaatgacaaagcctttggctcagcaggactggagccttgacaggcactgaccaagaaagcctctaggtgggccagggaggtctgtgggaaagctttggatcaatggtactcaagggtgcacagtggcacagtggccttagttagaatttatgaagacgaaaagaacacaagtcagaatttagaactgaagtacctgcttcttataggcctgtagaggaaaagcgagatcatccttctggccaggactaggggagacccaaggcctgttctttcctaggggctgagtttgacagacctggattgcagctgatggcccccaaagtcctctagatgggccctgcaggactcgctgggaggcctggttgcccctcccggcgtgctgggacactctgggttcctgcagttagatgcagtccatggagttctcagggaggaggccagggatgcagccagggagccccaagcccttgataggagtgcagttgagtgggaggccgcagcccagggaggggtcctgggtctctatggcctccagcctgtccatgttgttgtcccagttgatatggaagcgggtcacccgggggttcgaggccaagatgttccgctggagctggggcaggaagaggaacgtcaacccttgtaggtacgccctctccttggtcccatagagccaggacacccccaatcacccatctcaagcccagcaagagcaacctacatatggaactccagaaaacacctgtggccaggaccttatttatttatttatttatttattttttgagacggagttttgcttttgttgcccaggctggagtgcaatgctgtgatctcgtctcactgcaacctctgccttccgggttcaagcgattctcttgcctcagcctcctgtgtagctgggactacaggtgcaaggcaccatacctggctcattttcgtatttttagtagagacgggctttcaccatgttggccaggctggtctcaaactcctgacctcaggtgatcctacagcctcggcctcccaaagtgctgggattacaacgcgtgagccactgtgcctggcccaggactttttttttttaagggacagtctcactctgttggtcaggctggaatgcagtggcacgatctgagctcactgcagcctcaaactcctgggctcaagcgatcctcccacctcagcctccagagtagagcacaccacccatgtctggctcatttttttttttttttttttttgcgggggttagggacagggtctcactatgttgcccaggctggcctaatcttaattctctaagacatgcctttgagagacaaaggtctttttctcctcttctaacacagtactgtaagaactgaatattacttgaaaaccttaagaagtgaccttgactctcaatttgaatggctgaactccccccaagtataaagaacggccttgtgggaagcaggaagtggaaacaggccccacctgggagaaatctggcttcatgggcgggttctcacgcagctcagggttgaggtactcgttgttgacgtagtagcccactcggatgaactcctgtccatggtaggtgcaggtgatgaggaccacagtcacacccacggcatcagtctctgggatgagggatgggttgggggcgtcggcctaggggagacacatcctaggccttagcagtgccacagccatgcctcgatgtcattagtacaaagattcccaagcatcatgtatttactgagcaaaaagtatgctctctgccctcagttttcttttttttacttctgcctctcgggttcaaacaattctgcctcagcatcccaggcagctgggactacaggcacacaccaccacacccggctaacttttttttttttttggtatttttttttaatggagttttgctctgttgcccaggctgaagtgcaatggtgcgatctcggctcactgcaacctccgcctcacgggttcaagcgattctcctgcctcagcctcccgagtagctgggattacaggtgcccaccaccatgcccggctaatttttgtatttttagtagagatggggtttcgccatgttggccaggctggtctcgaactcctgacctcaggtgatccacccgtcttggactcctaaagtgttgggattacaggtgtgagccactgcgcccagccttttttttgtatttttagtacagacgggatttcaccatgttggccaggctggtcttaaactcctgacttcaggtgatctgcccacctcggcctcccaaagtgttgggattacaggtgtgagccattgcgcctggactttttttttttttacacagggtctggcctccctctgttacccaggctggagtgcaatggcgccatcatggctcactgcatccttgaactcctgggctcaagcaatcctcctgcttcagcctcccaaatagctgggacaacggtgtgtgccaacatgtctagccaattattttttgtagagacagggtttctccatgttgcccaggctggtctcaaactcctgggctcaagcgatcctctcacctcagcctcccaaagggctgggattacaggtgtgagtcactgtgcccagccaggagttgtcaactgatggaaacacagaatcaatcccacaaatgactacaaaacgttgactgtggcagggagaggtgcgtggtactctggaggagtgtggtgagccgggggacagtggcatgaagctgaacaggtgaggcaggtggtatcaggccacccgggggccagctaagggattgggaaagggcaagagagtaagcaggaggttaagtgccacatcactcttgtgatctgaaaagaagcctctggcaaagtgtggagccgtgacaggagactgtagtggagcagaaggcttacaccagtcatcctggagaggcagtggacttggcttagaccaggcagtaaagaacagattcagggtgtactactgcaaacaagaccagccacgtaattggtgcaaaataaaaccaatgcaaaatgaaaacaccacgcccctccagaaaagctattaggtttcagacggtgacagcagagtatcgcaccaagtgtggggtcctgtgcagctgcctgggttgcacacccaggaggccagtcctgactgttgagtagatagggcctgtcagtggatttagtagtggtggctgaaggggttagataggatgtggtagcttggattagggcggtaacagcagtgatggaggtaagggagtgtatccgagcagaggatcctgaaaaatcacctggagaactcagaatctccatttgttttttctttcttctttttttttttttttttttttgagatggagtctcactgtcacccaggctggagtgcagtggcgtgatctcggctcactgcaagctccgcctcccaggttcacgccattctcctgcctcagcctcctgagtagctgagactacaggtgcccgccaccaggcctggctaatttcttgtattttttagtagagatggggcttcaccatgttagccaagatggtctcaatctcctgaccttgtgatccgcccaccttggccttccaaagtgctgggattacaggcgtgagccactgcaccggccttctttttttaaagagatagcttttccctctgtcatccagactggagtgcagtggtgcaatcacagatcactgtaaactcctggaactcctgggctcaagcgagcctatttttttttttttttttttttagagacagggtctcactctgttgcccaggctcgagtgcagtggcgcaatctcagctcactgtaacttccgccccctggattcaaataattctcgtgcctcagcctcccgagtagctaggataacaaatgtgcaccaccacatccagctaatttttgtattttttagtagagacagggtttcaccatgttggccaggctagtctttaactcctgaccccaagtgatctgcctgccccagcctcccaaagtgttgagattacaggtgtgagccatggcacctggcctcaagtgagtcttctgcttcagcctccctagtagctggcactacaggcctgcatcactatgcctggttaatgttttttttgtagagacaggtctcgctgtcacccagaatgcagtgcagaggtgcaatcatagctcgctgtagcctcaaactctcaggctcaagcaagcctcctgcttcagcctcccaagtagctgggacgacaggtgcaagccaccacacccggctaatttttctattttttgtagagatgggggtctcgctatgtggcccaggctagtctggaactcctggccttaagcagtcctcccgcctctgcctcccaaagtgctggaagccaccacacccggccagaatctacatttgacaacccaggtggggtgctgcatgagagccatttaggagttacagtccatcctcattattcatgggttccatatgtgcaagttcacctacctgctaagtttatttgtaaccccaagatgaacacctgcttgctttcacagtcacttgcagacatgcacagagcagggaaaaactggagttacctaccatgcctgttcccacctagagttacctaccacgcctgttcccacctgaggtcaaacaaggcaacactctgtcttctggtctcagctctcactgtgaatgagcgtcctttcctcagcctacttagtgcttttttccatgttttgtgctttttgttggtgagtttgctgtctatgatggcacccaacggtagtgctgaagtgcagtgtaggatacaagaaaggctttatggaaaatatgcgtattagagaagtttcattcaggagagttatagtgctgttggctgtgaattcaacataaatgaaccactgtatatattaaataaggtatctttcctttttttctgagacagagtatcgctgtatcacccaggctagagtgcactggtgcgatctcagctcactgcaatctccatctcccaggttcaagcgattctcccgccgcagcctcccgagtagctgggattacaggcatgcgccaccacacctggctgatttttgtatttttagtagagacggggtttcatcacattggccaggctggtcttgaactcctgacctcaggcgatccacccacctcagcctcccaaagtgctgggattacaggtttgagccatcatagccgtcctggtgtcttttcaacataaacacacatacaagtttacgtattaaccagctgacgaaaatgtgacttccaagaatctaaccctgtatttcccctggggcaatggttcagtattcactaattcagtgttcgcggcaactttatagaacgtaactcttgtaaataatgggaattgcctgtaaatcagtggcagctttgacacagaggtgggggaagggagggcctgacggcctctgagaggtcagatagttcctgacagtagaactaggatttgaacctgaacttttaaattgttttaattgattgattgagactgggtcttactgttgcccaggctggagtgcagtggtgtggtcttggctcattgtagcttccatctcccaggctcaagtgatcctcccatttcagcctcccaagtatctgagactacaggcgcacaccaccatgctctgctgatttttacattttttgtagagatgcggtctcactatattgccccagctggtctcaaactcctggcctcaagcaatcctcccacctcggcctcccaaagtgctgggattacaggtgtgagcaactgtgcccggcctctatgtttttaatacttgtttttttcttttttagagacagggtctcactgtgttgcctaggctggagtgcagtggctcactgcagcctcagactcccgggctcaagcaatcctctcacctcagtccctggagtagctgggtctataggcgtgagcccgtgcccagctgaacttgaacttttgattcctgaagcactctgtgggatttcaggtaaaagaggatgtttctaggaatcaagggctaaggcctaaggcctcatctttcttacctgaaagacaaacatgtgtctccctgctggcacagggcccaccagcaccgagtctaggatctgatcaaattcctcactctcagccgagccaacataaatgatcttccactccaggtctgcaaagatataggagggttaactaattgaaatagctcaacagcaagaaggcagggataggctcttgtatttttttttttttttgagatggagtctcgttctgtcacacaggttagaatacagtgatgcgatctcagctcactgcaacttccgcctcccaggttccagtgattctcatacctcagcctcccgagtggctgggattataggtgcccgctgccacgcctagctaattttttttttcttttttgagatggagtttcactcttgtcacccaggttggagtacaatggtgtgatcttggctcactgcaatctctgcctcccaggttcaagcgattctcctgtctcagcctactgagtagctggaattacaggcacctgccatcatggctggctaatttttttatttttagtagagacagggtttcaccatgttgatcaggctggtttagaactcctgacctcaggtgatccacccgccttggcctcccaaagtgctgggatgacaggtgtgagccactgtacctggcctgtttttgtatttttagtagagatggggtttcaccatgttggccaagctggtatccaactcctgacttcaagtgatctgcccgcctcagccttccaaactggtgggattacaggtgtgagccactgcgcccggccacatcttctattttatttttatttacttattttttgagacagtctccctctgttgcctaggctggtgtgcagcgggatgttcatggctcactgtagcctcaacctcctgggctcaagcgatcctcctgcctcggactcccaccatgttgggatcacaggtgtgggctgctgtgcccagccttgtggtaattttagacagatccttaatatgttaaaagactattattccatctgtcagacacttagtgccaggcactgcagtcttgaatgctgaggtgggcacaaagctctacctccattagggaattctgtcttgtaagcctagctatgacaggtgaccttgactatacctctggggaaacctgggcctctcaaggcctgagcgtgaactgtatggcagaggctgaattaagagccacgtgacacagacgtgctgagaagggaacggcagggagttgggtcatttcagggccctgcccactgggtgctgggataggaagcagcatcctctttcacacacagggaccggtgccactcaacgaagtggatccctcgacaactggggcagggtggcagattccaatccggcaggagagccagcctgcaggagggggaaggtgaggttgctcagggagccagccaccctggtcttccagatctggcaccaagtcatgcctacttagagacatttgggcaactcagtcaacaaatgtggcatcccggggtgatcctccaaacactttttttttttgacagtttcactcttgttgtccaggctagagtgcaatggtgagatctcggctcactgcaacctctgcctcccgggttcaagtgattctcctgcctcagcctcctgagtagctgggattataggcgcccgccaccacagccggctaatgttttgtatttttagtagagatggggtttcaccatgttggccaggttggtctcgaactcctgacctcaggtcatccatccgcctccgcctcccaaagtgctgggattacaggtgtgagccaccgtgcccagcctcaaaccctaactcttgcaccccatccagcaggagggccccctcccctgaatatgctccattgagatgaaaggaaagtgcttatggaacctctggctgtcaatcacaggaaattccggtcaacatggcctcttgcaggaggtccaagtgtatcaggggcaaggtcatgctggtacagggaggcttggcaagaggcttgaaacttatttttggctctttagaaattacacaacccttcagctctagcagctgggggaagtttcacaagctgtgattttcacaggaagcaaactctctcagaagctgccctgttccttggtccagtgtcccacaagagcatccaactttggaagcatgctgctgccaggtcatgactacagaggcttgtcacctgagccccatgcccttctttgatgcactggctgcctgtccctttgtggtttcactcaggaaccctatagcaggtctgtaggatacgggtgaccattgaactcacaggtgtttggtcgaactagcctcttactatttgcagggaggaagttgacttttttcactggagatggggtctcggtccgtcacccaggctgcagtgcagtggcataatcatagctcactacagccacaaattcctgcgctcaagtgattctcttgccttagcctcccaagtagctgggaccacaggcttgtgccacacgcccagggaatttttaaattgtttttagagatgaggtcttgcttggttgcccagcctggtctcaagcaatcctcccgccttggcctcccaaagtgctggaatttgtctgagccatcatgtccagcctgttgatttatttttgttacaagtagtgacacaactggaatcaagttttgggggaagacagaaaagccagccagccctgctctctcctttctaaagcagttgtatcattttggtgtatatccttgagccctttcctctcatagccggtagaatcctgtacgggtgcatttaattcatgtcctgggaaggtagacaaaaaagactaaagtgtacccacgagcacctgatgttgtccagctgaggtcaatactaatcggcaaaacctaaacaaagagcatgtggaaactcaccgaaataaatgggcccctgcaacataggcagactcgactctattaaaaatcaacaaaattaattgggtgtggtggcgcgtgccggtggtcccagctatgcgggaggctaaggttggaggatcgcttgagcctaggagttcagggctgcagtgagccatgatcgagccactgcattccagcctggacgacagagaccctatctcaaaggaaaaaaaagaaaaagaaaaaatgtactgtgttgactgtcaggcacaggggctgaaatggctctttcaaccagggctggaaagaaactggagaattaactaacggctgtagagaaatactgactcaagagttacagaagctggttgggcacggcagctcacacctgtaatcctagcactttgggaggccgaggcaggcagattgcctgagctcacgagttcgagaccaacctgggcaacatggtgaaaccccatctctactaaaaatataaaaatttagctgggcatgatggtgtgcacctgtaattccagctactcaggagtctgaggcataagaactgcttgaacctgggaggcagcagagattgcagtgagccgagattttgccactgcactccagcctgggcaacagagccagcctccgtcaaaaaaaaaaaaaaaaaaaaaaaaaaaaaaaagaagaaagaaggaaagaaaggaagaaaaaaagagttataggtatagggccaggtgaggtggatcattggatcatggctgtaatcctagcactttgggaggctgaggcgggtggattgcttgagctcagaagttcgagatcagcctgggcaacatggtgatacaaaaaatacaaaaaattagccaggcgtggtggcatgcccctgtagtctcagctactcgggaggctgaggttgcagtgaactgagatcgtgcctctgcactccagcctgggtgacagagtgagactccatctctactaaaaatataaaaaattagctgggcgtggtggtgtgcacctgtaattctaatttattttattttattttgacatggagtctcactctgttgcccagactagagtgcagtggcacgatctcggctcactgcaagctccgcctcccgggttcatgccattcttgtgcctcagcctcctaatcagctgggactacaggcaccccccaccacgcccggctaatttttttttctatttttagtagagacggggtttcactgtgttagccaagatggtctcgatctcctgaccttgtgatccgcctgccttggcctcccaaagtgctgggattacaggcatgagccactatgcccagtcgagaatcatcttaaatttgctgaagtgcccaggcatggtgatgtgcacctgtggttccagctacttaggaagctgaggtgggaggactgcttaagcccaggagttcaagtccagtctgggcaacatagtgacaccctatctctttaaaaaaaaaaaaaaaaatctggctgcagtgttataagtagagacatacgtgtatgatttcatctctaaatataatctttctttagaattatacatgggacacaaatcaccaatacagcaggaactcatagctatgagtacaggacacagctgtacacatgacgtgtgtacctaaccttctgagcaatgtcaaggcaactcaactgtgtcccatgttatctctctgcgctaacttcacaagctagtccctgtgcaagacatacctccactgtgtgtttgtgtgtatatatatatatatatatatataaatgataagactaaagacatgtacacaattagtatagctgaactagctaaaaagtctgcttcctgcttttttgttgttgtttttttgagacagtcttgctctgtcgcccaggctggagtgcaatggcgcaatctgggctcactgcaatttccatctcccgggttcaagcgcttctcctgcctcagcctcccaaatagctgggactacaggcacctgccaccaagcctggctaacttttgtatttttagtagagacagggtttcaccacattggccaggctggtctcaaactcctgacctcagatgatccacctgccttggtctcccaaaatgctgggattacaggggtaagccactgtgcctggccattttttttttctttttttttttttgaaacagagtctcgctctgtcacccaggttggagtgcagtggcacaatctcagctcactgcaacctctgcctcccgggttctagcgattcttctgcctcagcctcctgagtagctgggattatagctgcgtgccaccatgcctggctaatttttgtatttagtagagccggggtttcaccacgtcggttaggctggtctcgaactcctgaccttgtgatccatccgcctcggcctcccaaagtgctgggattacaggtgtgagccaccacacctggctttttctttttttttttttttgagatggagtcttgctttgttgcccaggttggggtgcagtggtgcaatctcggctcgctgcaagctctgcctcctgggttcacgccattctcctgcctcagcctcccgagtagctgggactacaggcgcccgccaccacacccggctaattttttgtatttttagtagagacggggtttcaccatgttggccaggctggtctcgaacttctgacctcaggtaatctgcccgccttggtctcccaaagtgctgggattacaggcgtgagccaccatgccaggcctcctttgtttgtttgctttttgcctttgttcataatcaaagatgagctctgctgccataacaacttcgttatttctgggtcagaacatctggcttctatgacttattcaaccagtgtctgttgaatttctcagctaaatgtggaagaatctatttccagatgtggaagataaaagtgcaaagggggcttggggcccctgagaaataggggtcacccaactggggcttaggggttagggtggttttttttttttttttttttgagatgggggtcttgctctctcacccaggttggagtgcagtggtgcaatcatggctcactgcagccctgacctcctgggctcatgcaatcctcccacttcagcctcctgagtagctgggaccacagacacgtgccaccaagtcccgttaattttttgatgtttctgtagagacaaggttttgctatgttacccaggctggcccaaattcctgggctcaagagatcctccttccttagcctcccaaagtgctggaattacaggcatgagccacctcacacagctgggttgggggttttgtcagattttcagttgacgctgctgagagtgaggcagattctccctttttcatggagaggagtccagaaggaggcagaaagcaagctggcagatcagtcacagagagccctaggactggaagagccaggatttctcacttgagttactcaaaggaaaagctttatcatccaggtacaattaacaatagcattctctggccaggcgcttaggattcaaagtgtaatcccagcactttgggaggctgaagtgggcatatcacttgcgatcaggtttgagaccagcctggccaacatggtgaaacctcgtctctactaaagacacaaaaattagccgggcatggtggctcaagcttgtaatcccaactacttgggatactgaggccggagaatcgcttgaactcgagaggtggagattgcagtgagctgagattgcaccactgcactgtagcctgggtgacatagtgagattccatttctaataataatcatcatcatcatcataatcatacgacgggcacggtggctcacgcctgtaatcccaggccgaggcgggcggatcacaaggtcaggaaatcgagaccatcctgggtaacacagtgaaaccccgtctctactaaaaatccaaaaagttagctgggcatggtttcgggcgcctgtagtcccagctacttgggagattgaggcaggagaatggcgtgaacccgggaggcggagcttgcaatgagccatgatcacgccactgcactccagcctgggtgacacagcgagactccatctcaaaaataaataaataaataaataaataaataaataataataatagcacttcccttcactgcattttgagtgtcctgattaggcaataaattctgtggtcattcctatctatgctccacccctgaaacagggaatccttcctttctttccctggattggagcaaagataaagaatttagattcaaaacttcagtgccaatacttctacaaactggctgtgtgactctggtgaagtcactccatttctattaaaaaatgatcagcagaggctggacgcagtggctcacgcctgtaatcccagcactttgggaggctgaggcgggcggatcacctgaggtcaggagttcaagaccagcctggccaagatggtgaaaccccgtctctactaaaaatacaaaaattagccaggcgtcatagcaggcacctgtaatcccagctgctcgggaggctgaggcaggagaatcgcttgaatctgggaggtggaggttgcagtgagccaagatcgcgccattgcactccagcctgggggacaagagcaagacttcatctccaaaaaaacaaaaaaaggaccagcaggttgaatttagcccttccggctctaattctataaataagttagtaaagtcacagggcaggggcttcctaggagtagaagtaccagataatgaccgcacaaccattttttttttttttttttttttttgagacggagtctcgctctgtcgcccaggctggagtgcagtggcgcgatctcggctcactgcaagctccgcctcccgggttcacgccattctcctgcctcagcctcccgcgtagctgggactacaggcgcccgccaccacgcccggctaattttttgtgttttttagtagagacggggtttcaccgtgttagccaggatggtctcgatctcctgacctcgtgatccgcccgcctcggcctcccaaagtgctgggattacaggcgtgagccaccgcgctcggccacaaccatttttaaatgcaaggaacacaaacaggctgattgaaacctgatctcctgccgtcggggagctgggaatccctcaacctattacttccttccatctcctcctggcttttaaattaaatcttattccacagcgtcattctacactttatttatttatttacccgctgccttgttccagaaaggatttaactcggcatattctatagttagccacaagtagactccttaatttaaaaaggagcgagagagaccggggagagacagacccactggcctacccaaagcacatccacatctcactctatcagctccaagctagtccaggcgaccagctttgagggcaaaacacctacctgcccccgagaggcactagttagcatatcctggcttcacaggcccccagatcaccacctcctcggctgctgccttttctctttcaaccaccaagtagaaaaatggcctaatggagtacttcttcctgaaagcaggacttgcctgttagtggtgccaaggctccctaggtgaccttagattttggatttgtacaggccttgacttgaaaggtcttttgcgttttgtggctcctgtcttctcatctgtgagatgagagccatgcccacctttaagtcacacagattaataagtacatctacggaagcaccttggaaaagatgtacaggaggctgtgacctccaagctccagccgactgtttgaagctggagcccgtcacagctcagcccaatccacccaccccccagactaggtcagaccatcaaaagcaacgggagcttggcactgattatccagctatattaaaaaaaaaaaagaagaagacggggcacggtggctcacgcctgtaatcccagcactttgggaggccaaggcgggtggatcacttgaggtcaggagttcgagaccaacctggctaacatggtgaaacgctgcctccactaaaaatactaaaattagctgggcgtggtgacaggcgcctgtagtcccagctactcgggaggctgaggcagaagaatcgcttgaactcgggaggtggaggttgcagtgagccgagatcgtgccattgcactccagcctgggcaacagagtgagactgtctcaaaaaaaaaaaaaaaaaaaagaagaggaagaagaagaaagaaaaagtgacagaaaaattgctgcagtaactcagctggaaacgggtgggcaaacctggagaactagctaatgcctgcctggctatgccacccctcggatctcagtgtgtttatccaagcccacagagaaaggtggggaaggggagctggggagacaaagttcccctcaaagacggtagcatcctttcccagggagagctcaagcataggggggttgggccccaacgaaggagagaaaccaggttccagggtatgtgcattggggcagaaaagcggcagcaactggtgggcgtggggttattgaaatattggcaggttggggaggggactggtgggacacaaatgggaagatggggttgagagaggtcctgaaaaggggttgaggggttttcacaggaaaaaaaggttactggaggggagggtcttcacggcaaggagagaggagcttgggtgagaggtctccatagggaaaataggagatggctgggatttcccccggggaaaatgggaaggggctggatattgggggtctccagagggaaaatgggaggtgtgagtatctcactacaggaaagagggaataagtgggcaaaaatgggtgggtggttgaagcgggggtcttgccacagggaaaccacggtggctgaagatctccgtgggttaagaaatggaggccgagaaggtctccccatgaaaacgggtacctaggaagagctccagagaaaaaagatggatgaggttccccacgcgggaaatggggcttggagggggttaatctctatggggaggtcggggcgggcagtgggggaagaggccactgggaggtccgagttagctggcggggggtctccacccgggaggtcaaggcgggcagtgggggaggaggtcacggggaggtccgtgttggctggtggcggggggtctccaccgggagatccggttgactggcgggctgggggagatcggggttggcggaagggggacgaggggtttcatgggggagatcaagttggccatgggagcggttctctgaggggaggccggggtcggcccgggggtgggggtccccgcacaggcccagcctcaccgtccgccagggcttcactgcactcgaagctgatctcgaaccggaaggggctgtggaaagggctcgggttctccaggaccgccacgttcagcaccgacaccttggccatcgcctcgcctcgccgcgccgcagcaggggcaggggctgtggctgtggcggaggccgcgcctgggtccggtggggtcagtggggtagggctgaccaggtccactcccgcctcttctctccgagaactgaagtgcgcacctagtccgcgcgccgccttcaaatagccggcctccgccctctggccaatcaccgccaacgctccctggcggcgcgcgcaccccctcagccagtcctggagcgccgatcggcgcgcgcccagactcctcggaccaatcagcggagctccctctccgcagcgtgtgaggagggcgaaactatctccaagcttcttagcgtgtccgctggaaaccaatccccagcgtctccgacttggatgtcaacggcgggaatggacggagtcacagcgccggcctccttctggccaatcctgagggttcccgcaccggcgtggcccgcccctcgcctcgcttttccgggagatgcatcccgcagcgcgcagcgccgccacccgccgagcggtggcgcgcggcgctcgctaaagaaggcgggaagggcggtgctcgcacccgaagtgattggcaggagggagtggggcggagataaagagggttttctgagagtttattggctggattggtaatggtggcgggagcagaaggaggctcagctggggattcgctggagagaagcggaagtcgagcgccaccgcggtgttggcgagtgtgaagagagaggaggagcgtttgcggcctcagcgtctgtcaacaggtgagcgtttcctggagcttttctgagtggctcctgacccttgaggtccagcggcgcgggagtccgttgtgaacgttgcgaacgttcggagtggcggtcacgaggcgcgctcagacctcgggaatccggccgggttcggatcccgctttcgcccccgaggggttcggatcccgctctcgcccccgaggggttcggatcccgctctcgcccccgaggggttcggatcccgctctcgcccccgaggggtttggatccctctctcgcccccttgagggctcttgggaggtttcaagcggacggtactgaaaatgggagttccagttcgggggcagaccagtgttcagagtccgggctctgctactcagcgcccgaggcagcgcctccccattcaacgggggccgtggcaattccctgacatgattcatgaccacataatacatccggaaacttctctccaccgcctcccgtctgggccgtcgcccccggcctgggagactccaggtctcagagtctctgcccccacgggcgatcagtgctgcccagtggaaaaataatgccagccgcgcaccaaaattaggtgtaaaattaacattttttggaagccacttttttttttttgagatggaatctcgcgctgtcactcaggctggagtgcaatggcgcgatctcggctcactgcaacctctacctcccgggttcaagcgattctcctgcctcagcctcctgagtagctgggattacaggtgcccaccaccacaaccagctaattttttttctgtattttcagtagagacggggtttcaccatgttggccaggctggtctcgaactcctgacctcaagtgatccgcccgcctcggccttccagagtgctgggattacaggcgtgagccactgtgcccggccatatctttttttattattatttgtaattttagaggctggtcatggaggatttcttgaggccaggagttcaagatcagcctgggcaacataacaagacctcatatctacaaaaaataaaagaataagccaggtgtggtagtgcatacctgtagtgtctgctactcctgaagctgaggcaggaggatctcttgagcccagaatgctccagccactgcactccagcctgagtgtcagagtgagaccctgtctctaaaaattaaaattaaattttaaaaaagaaagttcagtttagctgtcttgatagccgcagttgagtgctcctgagcccgtgtgacaagtggctcctgtattactggacagcgaaggtcagaaacacatttgaccaggtcacttctccggatgagagcattgtctttgaaactctatgctttgtctcctgttaaccacccagctccaacttcaaaccaggctaagtaaccctctttttgttaaaattctgacaagccactcccagtgcaaagcctctgcccagaacctcttctcctaggctcttggcatggcttatgccttcttgtcattcaagtctctgttcaaatgtcctctccccagagaggcctttctaagggtgctctggacagtgttcaaactcacaggccgtacgcctgaacagcactgagccaaggcactagtatttcttacccagtcacctctgtgggctcactaggactcactcactgtgctagtatgttttccttttccttttctttttaaacaatccagttcctgtgggattttttttttttaatagaggtctgttgcccaggctggagtgcaagtggcataatcgtggctcactataacctggaactcttgggctcaagtgatcctcccacctcagcctcccgagtggctgggatcaccagtgcgtgccaccatgcctaatttgttttattttattttattttttttttgagagggagtcttgctctgtcactcaggctggaatgcagtggcgcaatctcagctcactgcaacctcctgcttccagcttcaagcgattctcccacctcagcctcccgagtagctgggactacaggcacacgctaccttacccagctaatttttgtatttttagtaaagatggggtttcactatgttggccaggctggtctcaaactcctgacctcaggtgatccactcacctcggccgcccaaagtgctgagattacaggcatgagccaccgtgccctgcctcttatactttttaaattttttgtagagacagggtctcgctgttgcccaggctggtcttgaaactcctggcctcaagcagtccacctatcttgtccttaagtgctgggattacagcgcctagcccatttttggtatctacatctcacattaagttaagaaaaattctttttagctgttaaaaaatcgaaagctttgtttttattcttttgaaattatttggcttcaaggaaactcacatttatgattcgcttgatttcttggcaatcattgcatacttagggatatttgtgatttgagaaaatctaatttccaaatgtaattcgattgcttatgaatactaaatttaatgattaatgcagttgtcatgatgtcacatttctagatgcttaattaaacatttattcattccaactttgtagttttctctttgcattgtggaacttttttccctttatccctgtccctgaccttttcgtagcccctgagaagctcatgatccaccagcattatttccgtggcgctaatgaagaatgtggccctgtctatgatgcattctccttacagctggctgaatgatcttcacttgtaaaccagatcatgtcattactctgcttaaaaccttcagaggcttatcctacttagaatgaaacctaagatctttcctatggcttaggcggccctgcgtggtggcctcagctgacctctcaggcctcatctaccattcttcctcttgtcaccgctctcaagcccagctggctttatttcccttctttcaacacacccagcttatttctgccgcagggctttgcacttgccgttccctctgcctggaatgtgcttcctccagataattgcatggctgtctctttctcttcgcttgtggttcagctcaaatgtcctctgaaagaagacttcccagagtaccctatttaaagtagcactttcttggccgggcgcggtggctcatgcctgtaatcccagcactttgggaggccaaggcaggcggatcacgaggtcaggagatcgagaccatcctggctaacatggtgaaaccgcatctctactaaaaatacaaaaaattagccgggcgtggtggcgggcgcctgtagtcccagctacttgggaggctgaggcaggtgaatcgcttgaatctgagaggtgagggttgcagtgagctgagatcgtgcctctgcaatccagcctgggtgacagagcaagactccgtgtcaaaaaaaataaataaataaataaagtagctttttcttaatcacatcactcagttttatgatcttagtaacgcatatcagaatttgtacttattttcgggtgggcatggtggctcacacctataatcccagcactttaggaggccaaggcgggccggtcacttgaggtcaggagttcgagaccagcctggccaacatggcaagaccccgtttctactaaaaaaaaaaaatacaaaataaataaataaataaataaataaattagctgggcgtggtggcacgtgcctgtagtcccagctgctcaggaggcagaagaattgcttgaaccggggaggcagaggctgcaatgagccgagatcacgccactgcactcaagcctgggcaactgagagagattccatcttaaaaagaaaaaaagaatttctacttattttggttttaaattgtgcttattatctcatcatccctcagtagattgaaagctggttgtgagaagagatctcgcctagctcacacctctcaatgttgtacttccagagcttagcagaggacgtggctcatagaaagtcctcaatcaatttttcaaaaagaataaatctggctgggcgcagtgagtcacacactctgggaggccgaggtgggcggattaccaggtcaggagatcgagaccatcatggcaaacatgattaaaacctgtctctactaaaatacaaaaaattagccagccgtggtggtgcgtacctgtagtcctagctacttgggaggctgaggcaggggaattgcttgaacctgggaggtggaggttgcagtgagcctagattgcaccactgcactccagtctggtgacagaggaagactccgtctcaaaaaaaaaaagaataaatctatgtaaagggtgggtttagcatagtacctggaatgtgaaaagtactcaataaacatgaaccagccaggtgcagtggctcacgcctgtaatcccagcactttgggaggctgaggcgggtagattgcttgacctcaggagttcgagaccagcctgggcaaaaccctgtctctacaaaacataaaaaaattagccgggtgtggtggcatgtgcctgtggtcccagctactcaggaggctgaggtgagaggattgcttgagccctgggggcagaggttgcagtgaaccaagatctcaccactgcactccagcttagctaggcaacagagtgagaccctgtctaaaaacaaacaaaagactgaactgttagtagcatatagtaataagcagatacgtcttcattcttgtttaatacttcaggtgcacacatgctcgagaaagtataagaagtgctatagcaaaatactgttacccagcttaacagctaaaacattagagatgcaactgaagggccctatacccctacatcaaacccattcctcttcctttttcctcacatgtaaccacaaccctgaatttggtgtttacagtcttctgtgcatatcggcgtgtatctttaaacaatatatagtattgtttgtcatgttctatacttttatataaatggtgtctgcgcaatttagagttaacctagcaggcctgagactgctatccttagaaagacctgtttgcaagattggcccttggctgatatctaggaacttggatttcaggagggttcctgccgttccccaaatgatgagtgcctaaactgtttccaccaacaatgtggttcatgttgaacacctgctctccttctggagtctggcattttggtacacgaccacccccaagtacaactctggtcactgagtaatgagcttccctggtagaccgcctatccgtcgtgctgtcatacttggcggtaggaattgatggagtcctgtgtgactccactaggagaggactcttagaagcttgtcctggtttcctctggacttcagctcctgcatcttttccctttgctgattgtgccttgtgtctcttcactatcataaatcacagccatgcctacgcttccaagcaaaatcctgtgactcctcttagtgagtcattgaacctcagggtggtcttggggacctctgatagcaggatcatactgggtgtatcctgacagagctggcactaaggtggcactgggtcctgccttctgaaacttgctttttttaatccagtgtaatgcttttgagatttatctatgtggaaacgtgtatagctctaattcacttattttcactgctatacagctgtgctgataaggtaaccactagccacatgtggctatttagattaaaattagacgaaacaaataatctacttccccagacacactagtcacatttcacatgttcagcaggagcctgtggctagtggccaccatggtgtatagagaacatagagaggaaacatttccatgagaacagagagttttgttggacagtgtttatcaattcacttggttgaaatttagggtgttttcagttttctaccattacaaacagtgctgcagtatgcgttggtatctatgtctccttgaacacatgtaggagttactctgggagataaacctaggagttgaagtgctggacggggggttgcggaagtattcatcttttcaagatactgctaatctgctcttcggaatcatggtactggttctcactcccctcgttagtgttcctgttgctcagtgtccttatcttttatttttatttttatttttgagacagagtttcgctcttgttgcccaagctagagttcaatggcacgatctcggcctcccgggttcaagcgccgcctcccgggttcaagcgattctcttgtctcagccttctgagtagctgggattacaggtgtgcaccaccacgcctggctaatttttgtatttttagtatagatggggtttcaccatgttagccaggctggtatcgaactcctgaccttaggtgatctgcccgcctcagcttcccaaagtgctgggattacatgtatgagccaccgcacccagacatcttttaatttttataatgttttgatgttcagcatttttaaaaattattattattattattattatttgagacaaagtcttgctttgtcgcccagggtgaagtgcaatggtgtgaacttggctcactgcaacctccgcctcccgggttcaagcaattctcctgcctcagcctcccgaatagctttttggaccagtctctcatgcctgtagtcccagcactttgggaggccgaggcgggcgggtcacctgaggtcaggagtttgacaccaacctggccaacatggctaaaccctatctcttctaaaaatacaaaaagttgccggggttggcggcgggtgcctgtaattccagctattcaggaggctgaggcaggagaatctcttgaacccgggaggctgaggttgcagtgagctgagattgcaccactgcactccagtctgggcaacagagtgagactctgtctcaaaaataaacaaacaaaacatatattctgagaattaaatgagacaaaatgtaggaaagagctttgaaatgatacatttcagcataaatgtaccgtccctaggcacatgcagatgaatgggtgccactaacaactacctgagggtcagaggttgtcaggcacagcaggtttatttttatttttgagacagagtctcactctgtcgccaggctggagtgcagtggcgtgacctcggctcactgcaacctctgcctcccagtcccgagtacctgggactacaggcgcccaccaccacaactggctaatttttttttctttttttttttttagtagagacggggttttgccatgttggccaggctggttttgaattcctgacctcaggtgatccgcccgccttggcctccaaagtgttgggattacaggcgtgagccaccgcgtccagtcaggcacagtgggtttaggttgtgtgtagtgaaggggagagtaaaagacacagaaggactggtcatatttggctctcattgtatgcgggattcgatttcaaatcagagcatgaggtcaaatcacatatagttaaaattatctactcttttttttttttttttttttttgagacgtggtgttgctctgtcacccaggctggagtggagtgtgatcttggttcactgcaacctctgccttttggggttcaagcaattctcctgcctcagcctcttgaataactgggattacaggcgtgcaccaccacgttcagctaatttttgtagttttagtagagttttgccatgttggccaggctggtctcgaactcctggcctcaagcgatctgcccacctcggcctcccaaagtgttgggaatacaggcatgagccactgtgcctggctacaattatctactcttaaaagtccccatgcttgcccacagtgcatctctcagaaagtctagtagattcatttcatcctccagtgtgagaacagattacctcttcttcagctgggcaccagaggaaatactgatcttaggtttttggagccacgctgaattaaaaccttagcatcacacggtgaaactgaacccgctgagggaatggtagattcacagtttctatcattcttttttttctttttaatatatttctttatccttattgaagagcttccatcgcccttcactctcatcttgtgctcactttgggtcttgtgctgaattcagctcccattctttaacagaaatttacatatcgcctgtgtgccagatgctatgctaggctcagatcaagaacccttgcattttcagatcttacattctagccaagaggcagataataaacagataagcaaaacgtaattgctagccagtagtactatgaagacagagcaaggcacagactaggaagttctggagtggcttgggaaggccttctgggaaataggatttcattttcataaactctgcaggagaggaagtcaactctgtggatatggggatgggggagggggcccaagccagcagcgagaacagccggtgcaaaagccctgaggcaggcaagagggtgcctgcatgtttgagtccagcgagtggacggaaggtagggaggacgccagggggtgaggttggagggcctgtaggccattgtgttgacctttacctgtgctttgggtgagataggagagcattggagagttttgagctgaggagggacaaaatctgtttaccaagatcactctggtttctgtgttgagaaaaacctgaagagggacaaacgagctataatatttaggggactgttgtagtggctctggtgaaagatgggtgagaactaattaattctggatatttagaagttagagccaccattgcatttactgtcaaattagatgtggggtatcaaacaagatgagttcaagagaagctccaaggtctttagcttgaatcaaggtatggatggactcacttttagttgaggtgaggaagcctcaaagcctcacgtgggaagaactacagtggtggcagtggtagagatgggggtgggagaggccagggtctcagtttaggacaggttagtttgagatcctaccagataccaggcagagagatggggtaggtaggtgaatatatgtaaatctggagctcaggtaggagttcaggctggagagctacgtttgggggtgatcagtgtataggtagcgtttctttctctctctctctctctttctctttctttccttttctttcttttctttttcttctttccttcctttctctttctttctccgtttctcttttcctttctcttctctttcttttctttcttctgatggagtctcagtcgcccaggctggagtgcagtggtgcgatctcagctcactgcaacctccgcctcctgggttccagcgattctcctgcctcagcctcctgagcagctgggactacaggcgctcgccaccacacccagctaatttttgtgtttttagtagagacgggatttcaccttgttggccaggctggtctcgaactcctgacctcgtgatctgcctgcctcggcctcccaaagtgttgggattacaggcatgagccactgcacccacccggaggcatttcaaaccatgagatggggtgaaaccttccagggagtgagagaaaaggtctaaggactgagcccctgggttccccatcattaggaggtcagatgagaaggagccagccatgaagactgggaaggagtggctgttgtggggaggtgggtggtgtcctagacacaggtatctttttaaggcagaggggcccggaaaaggatccttgtagtttgagtagttatgcctctctctgagcatgggcagttcgttggtgaactgacaacgtgaaatacacatgatgcaattccaccgtgtgtcaagtttgaaagcactccctgccagtagcgtgtgggagtgtaggaatggcaattgtaatgagacatcacagtgtaaaattcctgagctctgctctagtacagcctggggacagacgtctgggccaagaagggcttctgtgagacagcatggaacagtggcctggtcagagagacttgggcatgcatctgagggctgtaagcctcagtttccccatctgtaaaatggaactctaatcgctgtctccatctgggaggattttgtgaggattcagagaaactgcacatgaaatgctccaccaggcccaggaacttaccaaggtctcataaacgtgaatgattctataactgtcaagcctctgccaggggttctgaatgctcgagtgcagaccagagcccatggggacgcccctgtgcagatctgctcaaccatttctttctttcttttttgagacagaatttcactctatagcccaggctggagtgcagtggtacgatcttggcttactgcaacctctgcctcccagccgggttcaagcaattctcctgccttagcctcccaagtagctgggaccacaggtgcttgccaccacgcccagctaattttgtctttttagtagagatggggtttcaccatgttgactaggctagtctcaaactcctggcctcaagtgatccacccacctcggcctcccaaaatgctgggattacaggcctgagccaccgcgcccagctattcacccatttcttactcccccactcaagaagtcacaccactcttgtcattccaagaaatcttaatttctttattgtttgactttttgactcaacaatttttttaaaactttttgtttttttctgaaacgttcttgttgttatgagccttttgttttgttctcgttaaatgcactcgacccaaaattggtttggcatatcgaaaaggagaccaaggagggaggggctggggcgtgggaggtggggaggaggcccgaatggacagaaagttgaggataagagaagaggaacatagagacagccagaaagacatggggaaagagtgttggagacagagaaaggggaaggcaagggaaagccaaaagaaaccaaaatccagagaaaaagaattaacaagatttaggagcaaacgagttcaggagcctaaggaagggagtaggagaggaaaccaagacccttctctgtaccgtcccagctggggtgggggcgtcaaggcaccaggtctggttaggttggggggacacctgggctctgggggcggctttgcactggactgcagtgatgtccagccccagcagggggccctgccacacagctctgaggcctggaagccacccggcgatgccggctggaacaggacccgatacaccctctctccctttgattgtccgagtctggagagatacaaggaaggctgggcagggaggaagttggcctctctgtgtgcctcagccccctggaactctcctggccctcctcctggtgtcgggggcagccacaggctgggctgcttcccgggacaggccagctcctcgcctgctcatgcctcctgcccgctcttcacagacctctgaccacccctccacacaacagagctcccagcctagtgcagtccgggaagggccatggaactgtcccttgccctcctcagagtcgtctggcaagactgtccctggcctcacttctcctccccatctagacttcacccatggtcttctggtgtaatgggttaggcctttctaccagaaaaagccagagttggaacccaaccccacctcttccccacacctgttcccttacacgggacaaaccaccatctttggtctgaccccttctcccctaattgatggggacaagccagccccagctccccgggagaagggaggggctttctagcagcaaaaagggtccctccagccacctacctgtccccttccccccagttccttcctagagcccctcccccttaacccaacaaagttcatggcagcagcaggctgagacccgaagatgtttgaaaactcatggcacttgtgagaaaaggaggggcagagagatggggagaggtcagagcagaggtggaggggccacctctggggaaacggcaatgcaggggctgggctagggtggcctggggctatgctgcccctagagttgagggaagggggctggggaggctggcctgacaggctggagaggagggggccgggacaggtgctcaggacacatcccgagcctggagcttccggggtctgggatttggggtcaagccgcccagaacatgggtgtcccgaccccagccctggcacctggcttcgtcttccctgcgggaaggtggaggatagggaaggtgatctctcacctttgcccctccccatcccccagaccgccttgccgttcccagcaccctcctcagccatacccatgccctccacaaccccagtgcctccccattttccttctgccatcaacctctctaggtgggaaatcagccccatcttccccggcgagagtccccagagcaatatacaagaagcaggaactcaaagggacagcgcagccatcttgacaaagcatctttgggtgtgaagaggtctcccccgggccggtggggagggaagggggagacaggcctctggtcctggggcaggcagtgagaggtacacgccccagaagggctgatgatgccgggcaggcggagcaggaaaggagggtgccaggaaggaaatgggttctttgtttcgctgttgcatctagattttgttttctgtctctggattgtaaaaagctgctctggcggcccgcccgccccggcggggactggggatgcacgtacacggagaagtcctggctgccaggccagcagcgctgctctgctccggagaaagcccgggctggcccgggccgcaggctcccggtggcttcaagtgatgagattttttttcttttctttttttttttttttgtcttttttttttcttttccatttcgttgaaatatttacagcaatggggaaggaggaggagagaggaaggagtaagagggccccctagggaaagatccaagcccaggacccactccccagggagatccagacccaaaatctgctccccagatagccgagcccacaggactgggaactgcccaaatatggccacccctgtgggctgggggccctgcggggagttgtgcttcatcaggagtcgccccaagggagggggtcattgggtgcactgggaggcagagggggcaggtttgcttgcggggcagggaccaagagcaaggggaaaggagcttcagagaaagttcaacctttaaaccaccagccaccaccgcccagtccccctgccctgcggccttttcccagtctccagggagcagggaattacagcgcaggaggaacctgtccatctgtcctgcctcactgctccctctgggtgcagccggcagcatttctggctgcggagaggagcagctaacaggttccatccagtgggggcctttggcaacctcagaagctgcccctccctgcccaggaaactaaagccctcatttcccttcacagggtagaagggtgggagaggggagagtctggaagtgggctgcacccttccaagttctccctcctcactcccctggggtcctctgggctcctcctcactacacttcccccaaatagagctggtgcgtgtggctggtgggaaaccctgtctgtgaaccctggcacctcaggcccccaggttagagtcccctgaggggactgtagggcccatggctgaggggcacctggagagagtggcccaccagccactgcctccatctgtctccctctcccaccagagccctgcccagggttccctccctggcctgggccaccagcccctggtccatgaggtgccctcagagactggtgaccagctgcatctgcccgtccccatcgggccctggcccctcaaggcctggggctgccaggtagccctcgtggctaggacgccgcacctggtagtagccctgcaggggattccgggccaccagggctggcgggcgcgaggtgtagtagatttcgggggggccggggggtgcgggagggggtgggggcagggcctcactgggcccctcagggctgctgtccgggtaggagggtgagtcccgcaggttggccccgctggcatagagggagtcccggccaggaggggaggagaggggccggctggtggcgccgtcctcggccgtgcagctctccgactcgtccagatcgctctggtacagcaccgactgggcccggggcagcagcagaggctcctccagggccttatagagaagttcaatctcggcccggtcagcacccccgggcccgcccgcctcttcctcgcccccgccccctggcacaggtggcacagggggctcaggcggtggagggcccttggccgcgctgctgctcccccgcaggttgttgtgcaccagctctgagatgatcatcttctcaaaggccgccgcatcggctaggttccggcctcggggcggctcagggcccccatccccgggagggaaatccccacttcgcaaggagtaactgttattgaagttgccgttcaggggcagggtgtccatgccacaggcttcccggcctcccaaggggtgctctgcagggcagaaaggggctggtcaggttgaagaggggccctggatgcactaggggacagtgagggggtgcggtccatgtggagaagtgggcttgattcctgctggttttccgtaggcttccccctgccccctggatctctgatctcacattccctttctccctcactggcactagacacaccagcccagcagcgtattgatgaaaggtgggggacaaggaccagttcccccaggatctcatccccagctggaggttcagaatctcagcagtgtgaggaggcctgggcaacaggatcgctttcctgtgctcagaccctcagcacttaacagcccaaactcaatgaacaccatccattatcctccattcggctgccagaggctgtgtgtcggggggtggggaaatgtgggcatggggaggcatcccgagttctcctccttaagtgaggccgtctgagaaggccactgtctgtccctctcccagcctcagaaacatccccagggaagagtcacacttactgggttcccggtagctccctgcaggtggcagccagaagagagaagagaaaaggcaaggatgagctcgaaatgcaagtccaggctccagttctggggcacagaacatcccatgcagaggtcccttgggacacaaaccctccatttcccaacctgggatgtttcccccgtgctctcacctggggagttgaagacagggggcgaggagggattgaagcccactgactcggcgatgagggtgttgtagggactggtgcccccacggggctgcagcacggggttggtcagcaggtggttccccatggtacctggccaaaggatcagaggtcacaaggcagccgggagcctccagagactgaagccagaggcagaaggatgccttctcacctcggttcagggtgggggtgctgttgatgtcacccgccatgaaggaggactccgtctgtttcctcacagtgtcattccacatcctccgaattcggctctgggaacacaacccaaatgtgaggggatccttgggccacccaccctctggcgtctttctgagactgctcacctgatcatcacgatcagaaacctaggccaagccactccccacctctcaggctccaggttccaacactcagccccagggagtcctgtctggcccgatacctgggtccctgtgtagtagcgggtgttgcttcgcatggctgaggtcttgagggatccgtgagtgcccccgggtggggagcggatgcagcagtaggagtgacgcaggcacttgctgtactccttgtgcacctgggaggtggaggacagtcagctggctgggacactggcctcctctgtgatccagtctcccacagggctggtcacaagacaggcagccttgggaggccggagaccgagcttccaatgactgtgttcccctgttcagcgacttgcaggccacggaagccttgatgtcccctgtcccccaacagccagccgatcaggtttcactctcttcttactcaggcccatcctcttctccacctcctctgacagtttttcattcattcataaaatcaacagagcattattgagcatccgctatgtgccaggcacaatttaggcctcagggaaggtatggaacacaacagacacaaatccctacctctgagagcttatatttcagtagacagagacagaacatagatgaaaatataaatatgcaagctgttggatgctgttaggtgctgcggagaaaactatggccagaaagggggttaggcagtgctgacttgggagcaggttgtgattttttttttttttttttttttgagatggaatcttgcactgtcactcgggctggagtgcaatggtgcaatcttggctcactgcaacctccacctccctggttcacacgattctcctgccacagcctcctgagtagctgggattacaggcgcacaccaccacacctggctaatttttttttttttttttgtatttttagtagagacggggtttcaccatgttggccagactggttgtgattttaaatagatcagaggaggccaggcatggtggctcacacctgtaatcccagcactttggaaggcagaggtgggtggatcacctgaggtcaggagttcgagaccagcctgggcaacatggtgaaaccccacctctactaaaaatacaaaaattagctggtcgtggcagtgggcgtctgtaatcccagctagttggcaggagaattgcttgaagctgggggggtggaggttgcagtgagccgagatcgcgccattgcactctagcctggggacagaacgagactctgtctcaaaaataataatgataataaaaaaaaaacctaaaaaaataaatagatcagaggaggcctcatttaagccaaggtaagaacgggggctgcaccctgagggtccacatctaggtgtctgagagcagaggttggagggaggggagccgaggggcccagatcagaccataggggcctggggtcccctgaaaggacattgctgccactgcgtgtgaggtgggggctgtgaaaacactgcctttgaccgtgtgtccaaggaggggccaggacaatgttggacagagcagggacacaggccacctcctcccttgcaaccaggattctcatgatcactgcctctgccatcccctgccttaagccttacctgcctcaccactccccaagtccaacagcagtctccatggcctgcactgctgccaggactgactctacaaatgcctcagctccgtctccccagcttcagtcctgagggtgctgccagtatccccattccctgcccatgttccccagctactgttgtcccctttggtttttttaaatagagacggggtctctgttgcccaggctggtcttgaatttctgggcttaagcaatcctcctgcctcagcctcccaaagtgctgggattacaggcatgagccactgcacccagccctttgtatgtgtggtttttttgtttgtttgttttggagacagagttttgctctgttgcccagactggagtgcagtggcgcaatcttggctcactgcaacctctgcctttggggttcaagcaattctcctgcctcagcccctcagcctcccaagtagctgggactacaggcgcccaccaccacaccaggctaatttttatattttttaagtagagacggggtttcaccatgttggccaggctggtctggaactcctgacctcaggtgatccgcccgcctcagcctcctaaagtgctgggattacaggcgtgagccaccgtgtccggactgtatgtttttttaagattcagattttaacacatttattttaaaaagatcctttctatcaccacaaaattcacaattctttccagaactatgaatgtaggcagtgctccctcagggtggctcccaaagtcctccctctcccaggcctgactcgtggccctcatggtggtgagggttccccattaccaaatctgttctgctctcactcctctaagttgctgtatcttgttttccagaaccctcttcacccgtggttaaaccctccctaaccctgagctcgtgctcccctcccggtggacgcagacctgaccacagaagccctgcagcactcactgggggcttgagggagcccctgagtcccctccaccctcgccgccttctcctgggtacccaggaaacgtctccaagggaggctgtgacccaggaccccgcctcgacctcaccttcttctgtaaggcgcagtgaaagacgaagatgaagaccccctggaaggcgttgaaggtggtgaagagataggccatgaccaccgactccttgttgatgaagaggaggccgaaagcccaggtgaggcccagcaggaacagcagcgcgatggcccccagcgcccaggatctgggagtggggcgacaggggagtcaaagtacccgccggaggggacggcctcagcccaggcctcccctgcagcctacaacgggggcccttgggtgggcctgggcactgtctgcaaagccctgagcgggccgagtgggccttgggggcagtggcctgcccaggacacctccaccggagcctgggcctgagggaaaggtactgggtcaggggtcggggtattgtgaacatcagttattcctctgccaacttcattgtttctgctaaatttccagaccacttaggctatatttgctgcctatttctctttaagttgcccttaaacagactcaccttttgaatttagcctcagcctacataccgatgcccctaaaaccacaggttggacgtgctaatgatacgctatctaagacccattaagtaggtacatagtgaacacaatagaacacccctgttggtacttaaaattgcaatgtgtgtcaccagaggtgacagcactaccttttaggacaccctggaagaggtgggcccagcgtggggcgggggtgggtgatggggcagggggcaggcaggggcgaggctcacttaatgttgtccaggcggctggagtcgggcttgagcacagatgagcttcggatcatcttgtgcagggtcaccatgaggaacaccaggttgacctgggggcgggacaaggggcaggctgggctgagagtggccctgcctccctcagtgagcactgaggctagggcccagcctggcgaaatctcagctgtggccctcgcctctgctgggagaaccccgtacctgcccctgaggtgcccgctgtgcagcggtgagctgattggcatgaccggcaatttaatgccactcctggctgctgggaggacaaggcccatggcctgacacacactaggggctcaaatcacagccccccaggcgagcagccctcagcactggagctccatggacccagcacactttcatcctctcagccggtggctcagttccgatgtgtggagagagagagagtgtgtgtgtgtgtggggggggtggggggcgggggcaggggctggggtcaaggccagcctggatgaaggaagatgtggtgctaggggtgtcacctcccaactcaccacgataacgaaggagactggcccgatgaaactccagatgaagtaattgtccactcggagccagcagctgtaaaggaaacagggccggggtatagagagaagccgaggagccattcccagcgactcatgaaggcctaggactctgcaggctgcagcctctgggatcaggaggaggaagggactaccgccctgagggtcctggtccaaggggtgccgcccagcagggaaccaggtgggagggtgcagggctgggaggtggaaactcacgccttctcggtgccgtagctgcggtagtcaatggcagccgcgatgcccaccaccagggccgggaagcagtagccacccaggtagtagtacttggtgcgggaatactcgctctcaaacacctccactagtagcaggtagaggtgcacgccctccaggcacagccaggagaaggcagccaggaagaaatagtgcagcaggccggcgaagatggggcaggcaatctgcggggagcactgagggtgaggggctgctgcctggacaggtgtcccccttcttctcccggcccccaggcgctggccgtcacctgccctagagtcccagcccacctcatactgagtcttgtcgatcccgaccaggaagagcagctcagccaggaagaggttgatgcacaggttcttgtggatggtgttgcggtcggtctgcagcccccgcaggaagcagaaggtggagatgcagatggccaagcagaccagggagatcacaatgcccacccaggtgatgaccgacagcagcagctcgttgatgcggccctggtactggggacaggaacagggggcacgctcagggcctttggttttgcacgctgggctcagccaggtgccagccacagacagggccctgggcaaggccatgggccgtgaggacctctggtgccgccaacctggcagccctcacccctctgcacgcagcaatgcgctcacttcctcatgctctggaaggcttgtggagagatgaccaacgtaacaccaacttgcttctccagagtgccttgggagacggtgggatcatggccatagaggaccagacgcatggcctcatgccccaggcaagaccaggggccccccacacccatggggctagcctcccctggtactgcccgtgatctctctaggatgccatgcaaagccaggccagcaatcgggcctgcctggaggagcagagcaccagccagcttacgatctcacggtgagccatgagcacagcgaagttggtgaggtggctgcaggcacacgtggtatgggtcttgttggactccaccaggcggcagccttgggtcgaccagtagcccagcatggaacgctccgagtagttccagaaggagcagttagcattgaagtggttcttgtcctgttgtgtggtggcaccagggtgtcataactagagtcagaaccggggagtcccattccgaccccccacacctggcaacagggatggtaccaagtatcaaagaagtgcctggggtctggggctccagttgacattctgagagctctggggacaaatggcccaagctctaaagtggaagaacccataacttgttctggaggtgagcacatggaggggcaggtacacagcctgggaacacagagggtacagggacccccatggagggagggggacggctcagctcacctccaggtgggccacggtgaagatgacagggtccatgaggaagacgcggctggactccttgttgatggatgctgcgatgacctgtgagttcaccactagagaggcgcccccagggccacccgggcctgcttcgccggccagcttcactgtggcattctccgtggacaggaagaggcccaggttgttgtagaggatgaagacaactttgaccacccctggtgagaacaggcacgtttggatgtgtcagcatcctcagctggcgcacctccatccaggcccctggcttcccagctcagccagctcctcagcccttggccacgctggccactgggacctctgaagccagtccatagcccaggcaggtgggggtcagggagccctgtccacaagaccactgctcagctgaaggcagttctaaacagcagggcagtgtgccaggacacacaagctgggcctccgacccacccattctcactgtgtgaccttgggcaagcccctgacctctctgagccttcatctcaatggccccatcctctctgagctgtgaggcccaggagccagctttgcaactgtaaggctcacccttagggctctgcagcacttcagggcccatgaatcccctcaaattttacactagcatgagaaaaggtcagcaccgctgccctctacaaatggcacagagacgctggcacagagctggggggtgggggtggggctgcttccccacccgaggccccgccggggacactgaccattgcggctgttctgcttgatggttttggcagacagctggatggagttctttctcgggtactcctcctgggggaacaccagctcctgcacctggccctctgtgttcaggactgtgacctccaggactgtggggacaggggaaggcaaggcatacacagttggggtctgttcccagtccaggggctcaggctgcagaacgagactctggcaagatgcccaagggtcggatagcccccctgtggcctccaggccagaaccccgtggtttaaggttcgtatctgagtttgccctgggtgactgtggcactcacccacgttctccttggcagccaggaagcgggcaggctccctgacattgtcggccagcaggaaggcgccctcctccaggacgtcgaggagcatggtggccgtgtgcacctgctccgtggcattcatgtccttccaggactccagagcttctggccggagcagattgtccactgtctccaccacggcctgcacaggcagagggcatggtgctgtgagccccccaacaccctctaattcctgggggtgggctctgcatgccctcttctcaacctccacccctaatccccccatcagctggagcccacggtccttacactgggaccccctgggtctcaccttgatataatccttacaagttctctctcgcttgtgcatctagaaagagatggaggtgatgtcaggccaggcctctgggtgccggttccctcaccctaatactgtcacatctggatagctctctcgtctgcggttaccactgacccagggctgggctatcagcaagacattcctcagggatccccaacccccaggaccatccggggcagcacaggagtgagacccggcagtccttggcggagaggggggggtccttcctctctgaggaaaggagtggaggtggcagcctggctgggaggtaccaggtcaggtacttcccaagcccctgggggcaggcgccctccccataccaggtcagcgccaccgccaggccccaccttgttgtagttcttgccggctgactcgcgctcgatgggccgcagggcctgcagctgggcatccaggatgtccagcagctgctccatcagcttcacagaggaggagacgtcccccgcgtagatggagccccgggtgtgtcgggccagctcgctggcgatgttggccgcgttctccccactcttgatctgcatgaggtgggggcgggaagggggaatcccaggactgtcagggaccatcctgccctccccggcttccctggcctgtgcagcctctcctatctctctctccacttccccatcgccatctgccccttcccaccccatctgtccctgctccctttgtaggccagggaggtgaccccacagtcctgccttccagacctgccagcccatgtctccccagctgctccacgacccccgctgggccctgggccctgggcccgagcacatgtgcctgcctgcgaggggtggtggctggtaccttctgggccacctggttgacccagggggaggtgcagttgctgaggtcagggccccgggggttccagagccccaaggctggtagacactggaaggaggcaattcctgcagggacagacagacaggaacagacaagggagccaaagggaagaagagaaggatgggacagagagggggaaaggagatgacagagagtgggggacgagcgggcgaagagggaggtgagggaaacacggagaaacagacatgaagcgggctggacagtcgaaagaggcgccactcacttcccctgagctctccctcctgcccccttctgtctttgcctccagagttagaaccttccagcaaggcccatcttgaacgccccctctccacgaagcacctgccaaccctcccctcagatctccaggacacacggccctgccctttttgcacttcagctggccatccatgtgaagctgactgtgcctggggctgtggcaggtcagcctgaggccgggagccaggtcacctcctgcggactccctgcaggttctgcaggtggggccaggggcactgagtggctcctgtgccctgagagctctgctggtcactggggatgacccctgccctcagaaaacctctgctccgcagtagagacccccacccacacatgcatctgtgctaagctgctgggggcatggcccccatccctcccctggctgcagcctctgtactcacctcgagtccccttggggcagggcctctccaccagcatgccctgctgggtggccggccactggacccgccgtacctctcggggctcgcagaagagctcaggggacacgtgtagattcggggctgggggccgccgggtgctggggactggggctgtggctggaggcagatcaggtcccagctggttgatggcacccactgggtgcgtggtgaggggtgcccggcggagcggggtggtggctgcgggcgaggctgtgctggtgaggggcgtgggcctggctgtggtggtcgtgctgaggggtggggaagtggctgggcctggagaggggatacgagacagggtcatccccatgctcagggccatgccacagtgtgcttgggcagggggtcccaggccatcttagcatcttcctcatctactgaagtggaaacacgtgccgggccccactgggtctatgagttgatctcccctggccgctctgtgcccaccaaagtcccttatgcccatgggcccatataaagtagcaaagagtggtaaaaatccacgatgtgtaccataaggtctgagagaacggtcaggggagaggcagggacagaggtgtctgggggacaggaatcctcccaggttgagcccgagggcaggagccctccccaatccaggtcagccccgccaccaggtgggggctgaataccaccgccccccatcctcgttctagctgactttggcttatgtaacctggctatgctccttccttctgggggcctcaactcccccttttgcaaacaagatggggttagatcgggctccctggagccctggggtggcacagagctagcagggcagctaggcggggcaaaagaagactgcagagttgccctcagcccggtcagcatcagcagctcagctcttttgtggatactggacttccacccaggattttggtggatccaagggttcctggagtaaaggtgcccaggcccctgggagaggcactgcagttcagtggttgggaggctgggttcaaatcctcaaataacttaatcccctacccacacagagcctcagtgtcatctgtaaaacagggcagtaaggatccctgtgtcatagaccgtgaggagacgagttaatgactgtgaagtgcttagaacagcgtctgtcacatgctgtgaatttcctttacctcccgatccccaagagctcacaggatggggctccccactctgggacccaggggtgggtgggggtggaggggacaaaggcaagcaggctccatgcctggaagtgagtcgtcctcaccagcactggggtcgggcggcccgaactccaggctgtagcgcaccacgaaatagttgttccagacgtacagctggttgtcgcgagggttgtagtcaacggaggagatgaactggtaggggttggggaaggtgaggctgacaggctcctcgcggttggcattggtgttgaaggcatagtccacgcggttgccagccgcctcgctgtcatcatccacgtacacggaacgcaggacgtacaggaccccacacaccatgaaggcgttggatgccgagcgcttgtcgtaacccgtctcccacgtgccctcaaagcgcagtgtgtaggggttcagctggctcaccaccagccgcccgttgttgccctcagtggcgtagatgacccacagcccgttctcgtccaccgccaggtcaatgtcggtctttccgccccagcggtagggcgaggtgtcatggtagttggcggtattgatgaccgtctccccgctcttgatgcgcgtccgtaggtcatacttgacgatgttgcgcgtgcgctccttgttgtagaagacggcaccatcgtagaccacaaagcctgtgccatccacgcggttgggcaggcggtaggtggtggtgtggcgggcggccacgtagtcctcccacgaggcatactcagtcagtgtgtccgtgcggtaggggatccagggcatcacgtagatgcggtcacccgcctgcagcgggtccttgcaccatgcgccagactggtgctctgactcgtgtgtcgaggtgggctccagcaccttctgcagggtccctgggcacacgaagactgggcagagtgggcgggaggggaggaggtaggagagaaggggcagaggcgagagggaggagagagagagagagagagagagagagagagaggggggagagaggcaagttggtcacgctgctggtggggagccaggttgtcccctcctgctgctgcagtcacggttgcttggtatggctggtgatgggaagggggtttccgggctgggacccgaccccctccccacgccctgcccagctgcccctctccctggaaatgtgaaccctgaaggccattaagagcggggttagtgaggggaagtggtgcccctcttcccttccctggctgctagagaccccacaggctggggaggagtttggcaagagccctcccagaggtggtcctgtgtgatttaagtgggggcagaatctccccgctacagtcactcctgactttgacggtccagggactcagcacccggccccttctccctcttctctgccacttagggaagagctagggtccaggatcccatccttcaccaaccacacccggacagtgtttttttttttaactcctctttcttcctcctgcaaaaattgcaaggtagagtggtgtttccatacccactgtgggtgtcaggagtgtctccctattccaggataggggtttcaactctctccccaggttcctgatgcagcctgctccccaccccccacccagtacccacgaagtcagtagccgaggaagggattcccagaggcagctcccaggctaggacggggaatgaaagagtctggcccctcctggagggcgcccagccctgcccccagccggcagggtctctcatggggtctggctcagcagcagacagtggcactgtgcacaggggtgggggtggggacatggagagggacagggctcccgggagagttggggagggagaggagagctgtgcagagggaagagagacaagggcgtatggggcttggcgaggtcctggctccgtgggaggctgcgctgcaaaccacctgggaagaaagggttagtgctggcggaggagagaggggtgagcagagaattcactccaaggcccaggcccgactgagggtccctcaggggggcagtcccaggtccagctcggagggggcaggggagggaaccaggcgctaggataaagacccagcccgccccagccaggccccccacctcccctggcccggaccccgatttacctgcgaccatccccggctcgggaagagggaccaaggcagcgctgatgtcagaaaggtggggggccccgccccacccccccaatccctgaaaaggaggaaaacctcaactgcatctcgttggccactgctggccggcccacccttgcccagtcacgtcccagcaccacctactcctaacctccccttgactgatccgggggtcagtgtggccagacaccccacctcctcccagagtgcgcccctccatccaggatggccgggcctccctcacctcctggctggcagaacccacacataggccagggcgagggcacagggcgagggtggagggtttgcagtgaattctctgctcttgcttggcatgtcaccaaagcagctggccccgaggggatcggggggctgggacctggcaccggcttggggggcagccccagtggcaagaggggcttgggctagtcctcattccccacctccagcaggcttgggagggagggggacaggcagcactcccttcacagcatgggaacaatgtggctcaggggccccctggcacaaagcagccaggatgtagtttttgtagagggagaggagcctgggacatagagctgggcaggagccaaaacgaccctggcttgggccctggggactggccatccccctgtccctgatgccctgaggggtcggcctgcccactctgtccagcacactggcctctgcccaagccggtccccacccccaccaggtgtgtggcatctgaggggacgtgtttgtgtgaaggggacggtgggaggcctcagagcctaacctgctcagagggtgtcaggggggaaaaatgtggttagaggtcaacccaggggaagggggagaagatgaggaagggtctgtctggggccttggacagcaaggacccttcaccagcaccaaactcccaatccctcctcttccctcccttgccccgtcaccccacccgccctgccctggccctcgaagagaaaatctccagtggtgccgcatccaaaccagtgggcctgcaagaagagtggctggtgctgggagggagagagactccaggagaaagagaggagactggaggggtgtggtgagggggcggacctggggccagcagcccaggcctctctgagatgggggagaggggaagacggggaggggagcagctcagagggaccctgccccacctccttcggaagggatgctccacagaccactgtaatttcaaggcaaaagggatccctaaaggccatgtcctccagccctgcctgctgctgccggcctcagatgggtaaatttcccaaaactttctggagaggaaatggtcatccctaacatctcaccctagaagcccctcagcagcagcacctccgctccccccaataacagccagtaatggccagccccatccactagggagttctctgctagaaattacggagtctgtggaagtccccagactgtgcccccgccgcccgccgcccatctccctggtcctctaaccacaacagcccagaagaaaccctgactgcagctttgcaagtgtgaaagaaacagagaacacgctcccccacccttcgctcccccaaccacgaggcccgcccccgccccctcgccctcattttttcattttttggcaggctgccccctcccagggctggggacagctgacacccctccccagggctgggcccccagctggtcagagatggggatcaggttgggggtggggaggactggtgctccatgctccaaaacagctctgggccttggaaacatcaaaccagaaggaacttaagccaccaggagcccgagacataggagaatctgctccccaaaaggaaaacaatggtgtcccctccagcccgcctcccatgaaccagaaacatgttataaaaggtacaggggaaggaggaagagagaggggagagacagagagagagagagagagaaagagagagagagagagagacagctcacccggtgccccagtgggggagccggggaagggagtccctccctccccacccgccctggatgcttatacacttctcctgaaggaggcaaaagaagtatgagaaaaggccaggtcccccgaaagggccagggaccaggaaggagggacagagagagacagaaacagcgagagagagaaaatcctgcccaagctcagagaggagcttccgtgggtatctggagggtggagatgcccgtggccgcaccagggctggtcccactgggaggacaacccagggtgggggataccgaccggaccaagtgtgggttggggagagaagaaggggccgggggagggcaggtcacataagtatggtacaggtagaacaaagtgtgagttaggggttagcattggtaacagtgcgtttacctttctgctccacttctactttaagcatcggaagagagagagaaaacaaattgaaaaaaaaaatgtgcaagaaaaaaagagaaaaaaaaagagattaaattgctttcgtttcttttctggcaacacgcccccttttcctttccttcctcgctcctgcttccccaaccccttccgtagcatcagctcgggcccccgcccccaggtcccttcctctgggggtggtcaggtggggtgagagggtgctggggagacagtcagagggacgagggggacacacacaggagggagaagacacagaaagacacaggggtggtaggggggtacaggcaggcagacagagccctcaggtgggagggggcacccttggtgcaaggcgggggcagggagtagggagccccagctgggaggtgggctccggtcagagggggcaccagggagtggtggggtggataagccactcggctcccttcccaccctgcctgctgccctcctgctagaaccaggggccccaggggaaggatttcagtgtctcccagggcctgggcccaccctcagccaagaaacaggctgaactccttcccctttatgctggcctcacccaggtccagctgacttcccccaagccctcacaacccagaagaagcaaacacagagagaaggtggcagagccagacacagaacgacaggcagacgggcagttgcacccgggccccagagagagccagggttggggagacggaggcagagaggtggcgggggtgggggacacagactgggtgggacagcaagtgggggcacagacacgctcccaggctccccaggggcaagtctgaggctcggcttctctgctcaacccacccagggcccgggggcccaggagctgggagctccgccctgcccgctgccctgcggacgggcggcacctaggggaggaaggggcgcggttagactgtgctcagctgcaaagcaaatccagcattagtcgggcttgtccactgtgtgggagggttcccacacatcacgtgccccctgccacccacccctgacccaccctcaccagcactggggtcacccccagcctctgaagccctgggccaggtggctgcccaggccgctccccctctgcatccctggcccctcaggaacttctgactggagggactggctctcctggcccctctctgaaggttccagcagggagctccgcaggggcagcctctgcctcccttcccagcgcctcacccagggcctggcactcaggagatgctcagtgaacattttggggacaagtgagtgcctggcctccctgtcctctagctacctcctgtccccgctttaactccagcctccttcctctggagcatcaggagttagctctgcccccaacatccaccccgtatgtgtgcacacatgtctgcgcgtgtgtgtgtgtgcgtgtgtctcctgtctccccaagggctcaggctatctctcttccatcagacaggcagccactcatcctctgaactgtcctgccctctgtccctggagcctgcctggtctctgtcggttgtagcccctggaccacgctcagggcctcggctccaggaggtttctcagctcctctcctcccctagcttctttcctgcggcttgacctgagcctctcgtctacttgctttggcttccacctggaccgaggaatttttcctgccctttatctcacctgcctcgggagaagttgggtcattatccgttgttattttaattttgattaccacagcaataatcgtaattgacaagaggcattacaaggagctgcaacaaaagcaacgactaccaagtgtccagcactcacgaggggccagcaactatgctacgcacctcactggccgtcttttgagaaccctgtctacagatgggaaaactgaggcacactgaagtgaggccacatggctggcgaaagcaggcaccatttcctttgcatctacagctcgggtgcacacaagcttgacatgcgttgtcgctactccttgtggcttcccagggaaggcttttgacccctctccaccccatcacagatgaataaacaggctcagctggcttaaagggcattggtaatattactgagcacatcctgaaccaggcatgggtctgggcgctggggcggcgggtgaagacgaagcctctgcccttgggaagtttacactcggcactcaaaaccctgccaccaggagcgactttgtggccggccctgggccaagcgcttctcacatgtcatctcatggactcacacctccttccgtagtggcccagagaaattaaatcatttgctcaaggtttcagagccagaaaactcaagagcccagtcgagccttgaacctacacccatctgactgcccccctgtgctgagctcgctgcctcccaccccccttccccgctgtcccagccgcgggagtcagccgtgtccccagtgctgtggggaggcttcaaggagcagatgggcatccccctcggtggtggctgaaggcctcaagcgctgaaaggaaaggacgaagagtaaaagaagaaaattacggaagcacagaagggatcctgtttccccagcatcgagtcacctgtgaggagaaatcaaaggctggcagggaaggttggggtgggaggggagaggagggagagttacagggcctcttagtccccaaacccggcccgccacactcagacaccctgatggccctgccttctccccactcttcccggaggccctaccaccaggttgactacatggaacccattgtgggaggagaagggaagggataatgggaaggagggagggaggagagagggcaggaaaaaggtgatgtcaagggtggggtgctgaggaggagagaccttgtctttgtctgatccctttggccaggtgcaagatggccaggctcctggctccccaaatcactttcttcaggctgcctggaggccaccctcagtccaacatggcggcatttcctttgcagacaggaagtgccacatggtaatggggagaccagtgaggagctatgaatctgttgaaaatgccccccagcccttcaccctgaatctgccaccaggcctcagaggatggtatcccactctatgggtgtagagtccagcttccatgattgggaagaagtgtgtggggagtgagggtgctgagagaacggtgttgagaggggcagtggggtaagtgagagggaagagaaggtagatgagaagggtcagaaaaggtcagaagagtcagaaaaggaagggatgtgagaaggcgagggaggcagatgggggagaaaagcatagaggccaagggagaagagagagacgtaagtgtgccaggcagagcacgggaccatggcctggcagtgtggaaatgagtatagggtgcatgaagaagcagggtgagtgggctggggtaaggagagctggagaaggtgtccccacaggaggggacagagtctgtgaggcgggggagcaggcactgagtgtggacactggtgtctgggattagagaatgtgtgttggagagagcaggcccggctgtccccactgtgcccaggccccatgcatgtgtgcacatgtgtgatgggtcaaggtgtctcctcctcactcactcatgcgagaagggcccgcatccgcacaaggaacaagatgactcactgtaggggacacagtcgtactgcacctccaggtacttgtaggtcccaggacaggggtcaggaaaggcatccgagccggcgaccaccacgcactgggtgcggttgttacaccttcagaggagaaacagggcattgggaaagaaacacatagacggggtggcgggggtgggggtgcatgctccagggtcatggtgtcatagacacccccaaattgggaaggggcagtggagctggaaaccaagtgatatagtttggatctgtgtccatacccaaatctcatgttgaattgtgatctccagtgttggaggtggggcctggtgggaggtgattggatcatgggggcagtttctaatgaatggtttatcaccatcccctccgtgctgttgagatctggttgtttaaaagtgtgtagcacctcccctgttctcttttcctcctactccagccatgtacggcgtgcctgcttccccttcaccttctgctgtgattgtaagtttcctgaggcctccccagaagcagaagctactatgcttcctgtacagcctgcagaactatgagccaattaaatgtcttttctttataaactacccaatctcaggtatttctttataccagtataagaacgaactaacacaccaagcccagaggacttgtgtgggcactttttgtttcctgcctgctctctctttcccaccagggttcttctattttcagccccagcacagcatcatcctcagggctaagaaggaggagtcacccgctaaacagtgctttcctggccacccctcatctctttcattgtgagtgtagctgacactattatatccttggcatttttctttaaatggactttaaagcccctgcgctgttcactggagagtaatacatgtgaagccatgcacgtgaggtggtgtctctgcaaacttacgatcaatgaaatgttcagtgtccagctgtgtccacttcacaccatctcgtggacacatcccaccctttgggcagtgctgctgtgcagacttatagccagggcagccaggagagagcatccccaggggaaagccattctcggttcccaagaggcaactcctccaagtcactgtcaacttcccagggggctggctagcatgtaagggggaacctatttaacaaaaaggtgtgtctcatctgctgtctgtccccactgtcagggtctctgtcccttgcagcaggctggggctaggccaggcaggacacgggcatgcaggacatagtttgagaggcttcccgacaggtatggggcagaagaggccctgtgtctccccttcaatcctgctcttaaccaagggtactaaacacaggcagacacttgagaagggactaaggatctagcagggagagagaaaaatggggggcaggatggggtgtgggaagatctgtctgtatccatccacctcatcctcttctttaaaaatagaacactggctgggcgtggtggctcacgcctgtaatcccagcactttgggaggccaaggcgggtggatcacctgatgtcagaagtttgaaaccagcctgaccaacatagtgaaaccctgtctctactaaaaatacaaaaactagccaggcgtggtggtgcatgtctgtaatcccagctacacaggaggctaaggcagaagaatcacttgaacccaggaggcggaggttgcagtgagccaagactgagccactgcactccagcctgggtgacagagtaagactccgtctcaaacaaaacaaaagaaaacaaaaaatagaacactggggcagggtgcagtggctcacacctgtaatcccagaactttgggaggccgtggtggatggatcacttgaagccaggagcttgagagcagcctggccaacatggtaaaaccccatctctactaaataaacaaaaattagccaggcgtggtggggcgcaccggtaatcccagctactcgggaggctgaggcccaagaatcgctagaacccaggaggcagaggttgcagtgagccgagatcgcaccgctgtactccagaagtagacaattcatacattttaagttgtgtgctgttgtgagtagcctgatgaaatctcatgctgtatggggcgtgtccatgctgtatttgctccctgtctgttagtcactagtggtcatctcagttatccatcaactgtcacggtttcacagtgcttatgttcaagtagcccttagtttatgtaacaatattttactactaaaaattattattgttgttgttagtctctcactgtgcctaacgtattttattattattatgttttgagacagggtcccgctctgtcaccgaggctggagtgcagtggtacaatcttggctcactgcagcctcggcctcccaggctcaagtgatcctccagcctctgcctcccaaggagctgggactacaggtatgtgccaccatgccctgctaattttttgtatttttagtagagatggggttttgccgtgttgcctaggctggtctcaaactcctgggttcaaacaatctacccgtctcgacctcccaaagtgctgggattacaatcatgagccatcacacccagcctattttattttattattttttagacagggtcttactctattgcccaggacggagagcagcggtgtgatcatggctcattgtagtctcgacttcccgaagtgctgggattacaggcatgagccaccgcatctagctgtgcctaatttgtaaattaaactttattataattagagctgtataggagaaaacatggtatatacaaggttcagtagctctctgcagtttaggcatccactggggttcttggagcgtttccccagtgggtaagtggggattactgtacccaaaagaatttaaaacaagtgtttaagcaaatcgttgtacacgcacgttcacagctgcattattcacaatcaccacaaacgtggaggcagcccaaacatccaccaacaaatgaacagctaggctgggcgcagtggctcatggctataatcccagcactttgggaggccaagactggcagatcaattgaggtcagaagtttgagaccagcctggccaacatggtgaaacgtcgtctttactaaaaatacaaaaattagccgggcgtggtggtgcatgcttgtagtcccagccacttgcgaggctgaagcaggaggactgtttgaaccggaaagcggaggttgcagtgagccgagatcatgccactgcactccagcctgggggagagcaagactccgtctcaaaaaaaaaaaaaaaaaaaaaaaaagagtctccaggcttggttgtggagcagtgggggttggggactcagcggagaggaagcaggactaaggccccctacaagtccttctggatgtgactccagaggcctcatcacactccctcagccccggtaactattctgcacagcattccccacggacatgggaactgggccagatgctgtactaggtgctagagagataatggagaagaatgcagtcccccaaagctggtgttgaatgaagtcagcagggagaatttggagaggtgggaggaagggggctcccagggagggggcccacagcctaagcaaaggctagagcctggactgggaatgcctatgcagggcaccctcggcaggggtgtcaggggacaggaagcggggaagagaggcaagattgctggaggggaatggcagtttgagagagaggcagagaggaggagatgatgaggtgcctccagcccagcccagcccagctatctcagccacctgaacactgtcatcccctgcccaaacctctcctgctctcctggggctctcagtgacccgctcctcccctggtaacacacattttttttttttttttttgagacagagtctcactctgtcacctaggctggagtgcagtggtgttatcttggttcactgcaacctctgcctccaaggttcaagcgattctcctgcctcagcctcccaagtatctgggactacaggctcacaccaccgtatcaggctaatttttgtatttttggtagagacagggtttcaccatgttggccaggttggtctcgaactcctgacctcaagtgatccacccgccatggcctcccaaagtgctgggattacaggcgtgaaacactgcacctggtctgtttttttttttttttttttttagagacagggtcttgctcagtcacccaggctggagtgcagtggtgggatcatagctcattgaagcctcaaactcccgggcccaagtgatcctcctgcatcggtcatctgagtagctgggaccacaggcacacaccatgactggctaatttattttttagtttctagtagagacagggtcttgctatgttgcccagtctggtctcgaactcctgacctaaagcgatccccctgcctcagcctcccaaagttctgtgattacaggcgtgagccaccgcgtccagcctgggtgtaatttgaaggaaaggctgatcagctctacatggactgactgtgggtgtgagagaggcttgtgcagatttgcacacgtggtgcctcagcctggggcaacccctccacgctcacacaatcacaaacaactcaaagaaatacaaatacactctcagtcaaccacacacaaaccctcatccacatacacacatctgcccacagacacagttaaatacacaaagacacagccacacccacccacccccacacacgtgcacccatccacctcaccactcacagatatgaaaacacacacctcagtcagccacacccgctcacacacatgctcacacccacacccgctcacgtacacttaaacacacccaaatacactcatataaccacatattcacccacaaacacccacattcacacacacatccacccacccagatacacactccaatacacactcatacagacacactcagacacactcaaagacatgtttagtcacacacatctgcacacacctacacctgttcacatacacttagacacacagacacacttagtcacaatcacacacatttagtcacacactcaaaaatgcacacatactcacactcaaatacacacacaggccaggcgcagtggctcacgcctgtaatcccagcacttaagggggccaaggcaggcaggtgaatcacctgaggtcaggagttcaagaccaacctggccaacatggtaaaaccctgtctgtacaaaaatacaaaaataagctgggcatgatggtgcgtacctgtaatcccagctactcgggaggctgaggcgggagaattgcttgaaccctggaggtggaggttgcaatgagctgagatcacaccactgcactgcagcctgggcgacagagcaagattctgtctcaaaaataaacaaaacaggccgggcgcagtggcttacacctgtagtcccagcactttgggaggccaagtgggcggatcatgaggtcaagagatcgagaccatcctggccaagatggtgacaccccgtctctattaaaaatacaaaaaaattagcttggcgtggtggtgcgcgcctgtagtcctagctactcgggaggctgaggcaggagaatcgcttgaacccaggaagcggaggtggcagtgagccaagatcgcaccactgcactccagcctgggtgacagactgagactctgtctcaaaaattaaataactaaataaaataaaacaaatacaccgtcatactcatagatgcatgcaatcacacagacacactccaagttacagtcttgcatgctcaagcattcaccccacacacaatcactcacacaggcctgtgcttctatcatctgtgctcaggtgtctcctccttggagtagcctgatgagctctcaaatctgggatgggtgggtgcggtggctcatgcctgtcatcccagcgctttgagaggccgaggcaggaggattgcttgaggccaggagtttaagaccagcctgggcaacatagcaagaccctgcctctacaaaaaataaaataaaattagccaggcatggtggcaggcgcctgtagtcccagctactcaggaggctgaggcagggggattgcttgaacctgagaggtcacagctgcagtgagctgtgattgtgccactgtgctccagcctaggcaacagtgagaccctatcttcaaaaaaaaaaaaagagtctgggatgaagggaaaagtcctcccatgacaccttcgctctgtcctgctgttctttatattttacaagctccaaactgccctggctaaggctgggtgtgatggctcatctcatgcctgtaatgccagcactttgggaggtcgaggtgggcagatcacctgaggtcaggagttcgagacctgcctggccaattacaaaaccctgtctctactaaaaatacaaaaaaattagtcaggcgtggtggcgtgcgcctataatccccagctacttgggaggctgaggcagaagaatcgcctaaacccaggaggtggaggttgcagtgagctgagatgccaccacgctccagcctggtaacagagtaagactccatctcaaaaacaaacaaacaaactgccctggctaatcttgggatggaagttatggaagcaagaggctggtggggggagggacttcccagtgtatgtatgggtataggcctctgtcgggggcacaggctggctgtggggagatgtactgggtcttattctcgtctgcatggggcccagcacctattaagtgctcagtaaacatgtgttgaatgcataaaaaaaagatgtaaggtgaacgggtgtgctggcaggtgtgcagtgcttttaggcgggcacttcatccaggaactgccacgagagcccactcacctctgtgacatgatcttgaaggcgtccggcaggtagcactgcacattctccatctggaaagggtcagcatcgcaaatcttgtcgtccgtgcgcccgtagttggcattctccaccatgatgacgtcgctgccggggcaccgcagctcgatggggtagccttcacacgccagctcccggcgcatcagcccgaacgggagcccggcccggctcaggcctgcagggagggttggggatggtgtcactcctgggcctgggccaggaagggaagaccctacccactgccaagaaaacaccacctctggctcggctgtgtcctggaagccagctgaggcagcctcagttgattcagctgtagaatgggcctctcagtgtgcccacttgtgtagtgaggacattaacctggcccagagagtgcctggactctcagctcctaggaagtgacgtctgagcctttggaatgctctgcttgataagagtgactgttttcctggggtcctcgggctacaccagatatgctgttatggattgaactgtgttcccctgaaaattcatatgctgaagtcctaacccccaggacctgaaaatgtgacattatttggagataaggtctttatagagataaattcaaatgaggctattagggtaggccccaatccaatatgactgtggtccttataaaaacgggcaattttggccaggcacagaggcacacacttgtaaccccagcattttgggagacagaggtgggcaaatcgcctgaacccaggagtttgagaccagcctgagcaatatagtgaaaccctgtctctaccaaaaatacacaaattagccagacgtggtggcacacacctgtagtcccagctactggggaggctgaggtgggaggatcacctcagcccaggaggttgaggctccagtaagccatgattgtgccattgcactctagcctgggcaacagagcgagaccctatctcaataaaaaaagagggggtggggcgttgttgttaagataggatcttcctctgtcacccaggctggagtgcagtggtgcgatcatggctcactgcaagtctcaacctcctgggctcaggtgatcctgcctcaacctcccaagtagctggaactacagattcacgccaccatgtccggctaattttttacattgtttcatagaaatgggtcccttttctatgttgcccaagctagtctggtctcaagcaatcctcctgccttggcctctcaaagtgctaggattatgggcctgagtcctcgcacctggctaaaaggagaaatttgggcacagaagtgtacagggggaagacaatgtgaagacacaggagcaggcggccatctatctataagccaaggagaggccaggcgcggtggctcacacctgtaatccccgcactttgggaggctgaggcgggtggatcacctgaggtcaggagtttgagaccagcctggccaacgtggtgaaaccccatctctactaaaaatacaaaaatcagctggacgtggtggcatgtgcctgtaatcccagcgacttgagaggctgaggcaggagaatcacttgagctggggaggcagagattgcagtgagcccagatcgtgccactgcactccagcctgggtgacagagtgacattccatctcaaaaataaataaaaaataaaaaaaaaataggtcaggcacggtggctcacgcctataatcccagcactttgagaggccagggtgggcagatcatgaggtgaggtgattgagaccatcctggctaaaacggtgaaaccccatctctaccaaaaatacaaaaaattagctgggcatggtggcgggcacctgtagtcccagctacttgggaggctgaggaaggagaatggcctgaacccaggaggcagggcttgcagtgagctgagattgcaccactgcactacagcctgggcgacagagcgagactccatcaaacaaacaaacaaataaatgccaaggagagaggcctcagaaggaaccaaccctggctgataccttgacctcagacttctggcctctgcaactgtgagacaatcaatgtctgttgcttaagacacatggtctaggccgggctcggtggctcacacctgtaatcccaggactttgggaggtcgaggtgggcgaatcacctgaggtcaggagtttgagaccagcctggccaacatggtgaaacccccatctctacttaaaaaactacaaaaattagccgggtgtggtggcaggcacctgtaatcccagctacttgggaggcgaggcaggacaattgcttgaacccaggaggcggaggttgcagtgatggcatgcagagatcatgccactgtactccagcctgggcgacaaacaaagacacatggtctctggtactttgttagggcggccctagttaatgaatatgctaacaggacttggggcaggagctttgggtcacatagtctcagctgacttctagagatgctagagattcagctcagccctgtaggtggtctatcagggctacagagtacagaactgagctccaatacaaaccctggataacaaggcttgggggagcctctatggttggcagtacaccatgtgtgttgtcacacattgttgccgggagagttaacactgtccaggactccactgaagggagtaactggaaactccatgcatggaactttcttggactctgccctatgcacctcttcccttgcctgacttctatttgttttgagacagagtctcgctctgtcacccaggctggagtggaatggcgcgatctcagctcactgcaacctctgcctcccaggttcaagcgattctcctgcctcagcctcccaagtagctgggattacaggcgcctgccaccacaccccactaatttttgtatttttagtagagacggggttttgccatgttggccaggctggtctcaaactcctgacctcaggtgatccgcccgcctgagcctcccaaagtgctgggattacaggcatgagccaccacgcctggcctgtttgttttttcagacagggtctcaccctgtcaccaaggttagagcacagtggtgtgatcatagctcactgcagcctcaaactcctgggctcaggggatcctcctgcctcagcctcccgagtagctgggactacaggcacataccaccatgcctggctaatttttttttattttttgtagtgatgggggtacttgctatgttgcccaggctggtctcaaactcttgagctcaagcaatcctcccaccttggcttcccaaagtgttgggattacaggagtgagccagtgcacctggccctgattttaatctgtatccttttgatgtaataaactgtgagcaaattagccgggcgtggtggcaggcacctatagtcccagctactcaggaggctgaggcaggagaatggtgtgaacctgggaggtagagcttgcagtgagccgagatcacaccactgcactccagcctgggcgacagagcgagactccatctcgaaaaaataaataaataaaaaataaataaactgtgagcataacatctagttagttccaagtccttctagtgaatgatcatacctgagtgttctctgggggacccccaaacttgtcattggtgtcagaagtgaggcttggcttggggacttccctaacttcaccccaccccatgcgaggagcagagaaaacatgggaatgaactcatgtttctagaagaaaccatagagactggctttgccgctgacagggcagatgtgaagtctggttcagaatgcagattcgggccccatactcggcctgctggatcaaaatcccaggggtgaggccaggagcctgcagggctatgtgccaaccaggtgatggtgatgcatgctcaagttcgaacagtggctgggcgcggtggttcacgcctgtaatcccagcactttggaaggccgaggtgggtggatcaccagaggtcaggaattcgagactagcctggccaacatggtgaaaccctgtctctactaaaaatacaaaaaattagccgggcatggtggcaggcggctgtaatcccagctactcgggaggctgaggcaggagaatcgcttgaacccgggaggcagaggttgcagtgagccgagatcacaccactgcactccagcctgggcgacaagagcaaaactccatctcaaaataaaaacatttaaaaagtttgaacagccaccgttcttctttccccaagcctcagtttcccaatctgtaaaatgagcacctacagccccgggtcatcctgcagggatcctgtgccttagaaaatgctcttgaaggaaagcactgagcatggcaccctgcacacggagggtgcctgatcagtatcatctggtgaacctccaaggatttcactgtgacaaggaagggacatgttctgagcaggctgagctccctggggggattgcgttgccccatgttggtcatcaccttgtaccacacggggatggagaactagaatgtaggagccagacagatggctggggttggaattccagcccggccactccctggctgcagcctcatccaagtcactgaccgcctctgtgcctctgtccctcccctgaggggcagagaggacaattcccatctcacaggactgttgtgatggctccagggtgttaatgtgtgcagagcgcagtgagatgatatgaatgctaattattgttattatgaatattattaaggcggtttgtctgcacaacagagggtgcctggcagggtccatgctggccggggcagcaccttctgtgacgctggttccagccaggccctgcggggtgctggagggcagcagggattcagccagggacccagatgccccaatgtggggaccgtcgcttgtaggtgaaggaagtgaccacctgctgtacgaggtttcgggagggcactcgtgcgggacggtgacagagctgagcctttccagagatctgggtgggtaccccaggggtatggcagggaggcccttggggttttttggggtgagttgagtcccagcggggggaacatttcacatgtgttcctccagcaccatctgcctcctcatctaattttagccttcccgggcttgggagggagggccgggggtggaaggctggctcagatgggtctgggggtggaggcagccctcccggcccagctggggctatggggcaggacctggatgggcagagaacgtagcagcagaggagtgaggttgctggccagcggggcagtgccaaggccctggggcccagctgaaccgtgtcccttcaacctttggagctttccagagggcagggccagagggagcagagtcacccgccaatgcccttcatacagggatgtcggggtgggcagggggcacatcccagagtgaggggccgggcctactggcctcttctcttggcctctcaccttatcccgcccttgcccccggcctgggctggtcacggggccagtaatcgagtaatcggtgagggtgggcgggcaggcttggggcactaatagtggcgtgtgcaggatcctagggccggcatagggccgagccgggtaattagttgtttttaaataaacgtcagcgggcatgctttaattaagccttcttcccagtgagagcctcgaagatgtaatcacagagagagagagagagagagagagcgagagagagacagagagaggagcatcggctcaccaagaaggcctgtcctggtcccaggggccacagcgggatggcccctaccaacctggcccagccgacttgttggaggtaagaggatggtccaggggcctcttggtggcactggggtgtgtgttacccctgagtcttccactggcctgctccagctgaggtctggggcggggcagggggctgtaattctttactgagtgatcaggagggttttcaacattttatctgccccccccagaagggtttgggagccgcggcccctccccggccccagcagcacctaccttgggtggccgaggtgaccaggacggcggtgacacacagattccagagcactgcggctaggcgggccatggtggcagccgggtgcgtgtccggagctctcagtggcctgtgcggggggctttgccccacatcacctggcaggcaccacggcctggaccaccagcctgggggaggacagggagactgaggtggggatagggcctccaggccgctcccctctcctcctgctggtggctgagtagctctgagaggctgaggtccagcacgtccctcgagccagccctatctgtagggccccctccggggtctgcagctcacaccacaccccccacccttacacccagcagccagacccagctatctgggcacctctgggcaaagagactgccaactcttccccactggaacctcctgggacagctcacggggagatcccaggcaggccttggaccctctggaagcctcttccccatgcccctgtcctgaccctgcccactcatctcccctactcgcatcctcaccatgagcaaggaggtaatgagtgtcctcccaagtgagggactcattgcaacccaacttgcagcctccccgtcttgggcagaaatccaagcccccgcccccagccccctgcttcctgtctctcaagctctggtggctaattagaatccagctggcgccacagatcgggaaccagggacgcccgagtcccctctttcctctctgggggaccttcagggtaagctggagacaggcaggcggggtgggaggcggacactgcctccccctctgggggggccaggggagatgggggaggggtgagaattgtgtgctgtcccctgccatcctccccacctgctctgtccccaggcacagcggctcagttttttttttcattattattatttttttaaattttagaaaccaggtctcactctgttgcccaggctggagtgcaatgatataatcacagctcactgcagcctcaacctcccagactcaaggaatcctcccacctcagcctcccaagtagctgaaatcacaggcttgcaccactaccaccagctaatttttattttatttatttatttatttatttatttatttatttatttatttttttttctgagacggagtcgtgctctgtcccccaggctggagtgcagtggcacagactcagctcactgcaagctccgcctcctgggttcacgccattctcctgcctcagcctcccgagtagctgggactacaggcacccaccaacacgcccggctaattttttgtatttttagtcgagatggggtttcaccgtgttagccaggatggtctctatctcctgacctcgtgatccgcccgtctcggcctcccaaagtgctgggattacaggcgtgagccacagcgcccagcaccaccagctaatttttaaatttgctgcagagaggaggtcttgctatgttgcccagactgatctcaaactcctgggcttaagggatcttcctgcctgggccccccaaaactttgggattacaggagtgagccactgtgcccagtccaggactcggttctaactggtttcttcctgccttatggctgctccttctcacctctctccccgcctcagtctccccaaatcctctcaggcttgcacgctcaaatgtctgtcctcagctctttgctttatctacaccctggttctccaggtgtggtcccagcacactggcatcagccttgccaggaacttggtagaaacacacattctctctctctctttctttttttaagagacagggtcttgctctgttgcccaggctggagtacagtggcacaatgacggctcactgcaacctccagatcctgggttcaagtgatgctcctacttcagcctttcgagtagctgggaccacaggctctcgccaccacgcccagctaattttaaaatgtcttatagagacaggatcttgctatgttgcccaagctggtcttgaactcctggcctcaaatgatcctcccacctcagtctcccaaagtgctgggattacaggcgtgagccactgtgctggccagaaacacacattctctgaggcaggccctgaagcgtgggaacccctgctctgtcatatccagctgtcatcccagcctgtcccatctcaggctgtcctgggctctcagtaccatcattgagccagcactttcaaatctcttatgtccagcctggaatctctcatcagagcccccactaccatttccctgctgaaaaccaaaacccttgtaattggcccagttagctccctgaccccatttctgctccagccactcctgctattcctggaccacagcaggccttgccccagggcctttgcacctgttgcttcctccacctgtagcttctgccaacccactgtccacatggctggctccttcaggcctctgctcagatagaactattcacctggtgtatagaatgtcctcttcatggggcagggatcattgaactgttttgctcatggtggccgtatccccaacttttatttacttttatttttttagagatagggtcttgctctgtcactcaggctggagtgcagtggtgaaatcatggctcactgcagcctccacctcccaggctcaagtgatcctcccgcctcggcctccctagtagctgagaccacaggtatgcaccatcacatccagctaatttattttattttgcaaagatgaggtcttgctatgttgcccaggctgaacatgaacttctggcctcaagagatcctcctgcctcaacatcccaaagtgctgggattactgcgtgaggccatcaccactgttgtcttcatatcctcaacttttagaataggcctggcacgtggcaatgaattaattatttgttgaatgaatctcagatcccaaagctgagactctgccttgattcctcaccttccctgtcatccccctcacggaagccatcagcaactcctgtgggctctgcctctgaagtacctcgcgacctgcccacttctggctctaagcacagcacccaggcccatgcaccatcctatgtcacctgtatgttgtcctggcctccttgcccgcctcccaatccgcccttcactcagagctaagggaccacatgatgatgttgatccgaacattaactgaccccctggtctctgctggggtctcagttcctcactagagcccagaggctgtgggtgaactggtgccaccaagctctccaagccccattctgtcctccctcctgttcctgaaacattcaacattccagttccagtccccaagcaggatccctgcatgtcggctgcggctgctcattgttcagggctcagccgcaaggtcaccccagcagagtgacctaccctgaccccctgcaaacaaaacagtcctcgcctgctgccctcacccgccatccttttccctgtttttaattcacagctctcaagtgagcacctgaaattacctttttatcaacacgagcttcttgagagaggcccttacaaatcagcacacggctgggcacggtggcccgtgcctgtaatcccagcactttgggaagccgaggcgggtggatcaccagaggtgggagttcgagaccagcctggccaacatggtgaaaccccatctctactaaaaataccaaaaaattagccgggcgtggtggcgggtgcctgtaatcccagctactcgggaggctgaggcacgagaactggttgaacctgagaggtagaggttgcagtgagctgagattgtgccattgcactccagcctgggcaacagagccagactgtctcaaaaataaataaataaaacaaatcggcacaggccctcaataaataaagatccccacagggcaggacacctggtccagaccccagtctcctcacgtgggaaatgggaagataatatctgcaagacagccctgaacaccccctctccagccctgtagctctctgcccgcttcccctctcatgcccactcccgataccagctccctctccactgccccagcttcttcagtaaatcccccccagctacctccagcccccaaccgcgtctccccccacatccctgactagacacggccagtgtcactttcagatgattttacagcgtgttaccccgccgccgccaccagcccctatccgcatctcccccacatctgtgactagacatggccggtgtcactttcaaatcattttccagcatgttaccttgggaatggggagtggcttccttatttcaacttcctcatttctcccccaactgcccagccacagaaaggttcaggggaggcagtgtccccaagctgaggatactcccctcccagggtctccaagcgctttctttcccactgcaacaggcatccgagcagaggaactggttagagggagtaaaaatggctggcttggtacggtgactcgtgcctgtgatcccagtgctttgggaggctaaggtgggtggatcacttgagcccaggagtttgcaaggctgcagtaagctatgatcctgccactgcactccagtctgggcaacagagcaagaccctctcttaataaaaataaataaataaataaatggcagggaagccactcgatgccaaattgtgtgggcagcgaatccacatgggtctagatcccaattttgccttatacatgccctgtgtgaccttgagctggtctcctcacctccctggccctggttccctctgcgctgctattctgcagggttctggtaaggagagcagtacacgtacacgctgggccaatacaggccccatcagagggtgctgtgcacagcctggtgccagtcagggcacaaagacacccacggaagaggcagtccctctcttcctcccaggctgcaccctagaatgctaagactccagagtggaccccccagagccatgtatacttccaccgggaactccaaggcaccttcagcccaaccagaccaaaataagcccctacatcagtgcacggtgccaccatcctcccaggccctccagccagaaccccaggagctgaaacccttgactcctctctcacccctaaatccagttcaagagtaagtctttgggctgtgtatacttccagaacaccccagtgttggtccacacatctgtcttcagcatctgcccctctagtcctgggccctggccactccccaagtgccctctggctcctttgcctccgacgtccaggctctcctggcagccagaggcaccacctccttttttttctttttttgagacggagtctcactttgtcaccggggctggagtgcagtggcacaatcttggctcactgcaacttccacctcccgggttcaagtgattctcctgcctcagcctcctgagtagctgggattataggcgcccaccaccacgagcagacacggggtttcaccatgttggccaggctagtctggaactcctgacctcaagtgatccacccgcctcggcctcccaacgtgttgggattacaggcatgagccatcgtgcccagcctccaaaacttttttatcaccccacatagaaactccgtacccactaaacaataatgcccactccccttgtcgcccagccctggtaacttataatctactttctgtctccatggatttacctattctagacatttcatacaaatggagtcacaggctatgtggcctttttttttttttttttcccagttagatgggggtctcactctgttgcccaggctggagtgccgtggcccaatctcggctcactgtaacctccacctcccaggctcaagtgattctcccatctcagcctcctgagtagctgggactatagtcacatgactcctctaaatgaactcctggctaacttttgtattttttgtagaggcaggatttcgtcatgttgcctaggctggcctcaaactcctggactcaagtgatctgcccatcttggcctcgtaaagtgctgggattacggctgtgagccaccattcctggccttattttgtgtccagcttctctcactcagcgccacgtttccaaggctcacctacgttctagcctggatccgagcttcattccgttttatggctgcgtagtattccactgcatgggtggagcacgttttctttatccagtcatcggtaatggacatgcgggctgttgcacagaaggatcctttttattttctccctagctttgctgaggcatcattgacaaatagaaattacatctatttaaggttacatgatattttgatatccattatgtgttgtgaagtgattaccacaaccaagctaacaacacatccaacacctcacctagacacctttctggtgtgtgtggtgagaacacttgagtctaattcctcagcaagtttcaagaaaacagtatgctataataattattattattttgagacggagtctcgctctgtcacccatgctggagtgcagtggcgcaatcttggctcactgcaacttctccctcccagttcaagcaattctcgtgcctcagcctcctaagtggccggggctacgggtgggcaccaccgtgcctggttaatttttgtatttttagtagagatggagtctcatgttgcccaggctggtctcaaactcttgagctcaagcaatctgcctgcctcggcctcccaaagtgctgcgattataggtatgagccgccacacctggcctgctattattaattatagtcaccatgctgtaccttaggtctctggaacttttttcttttagagatgaggtcttgctctgttgcccaggctggagtgcagtggcaccatcaaagctcactgtagcctcgaactcctgggctcaagagatcctcccacctcagccttccgtgtagctggaattacaggtgtgtgccaccatgcttggctgattttaaatttttttgtggagacagggtcttgctatgttgttcaggctggccttgcactcctggcgtcaagcgatgctcccgccttggcctcccaaagtgctgggattacaggcacaagccattctgcctggttaaaacgtgtttatctgaaagctgaaagcttgtaccctttgacctacatcccccgccttcccctgtgccctcaccaccataaccactgctctactctgcttctacgagttcaattcttttttagattccacagataagtgaggtcatgcactatttgtctttctgtgtctggcttatttcacttagcataatgtcctccaggttcatccattccagaggggtgttttaaaagacaatcttggccgggcgcagtggctcacgcctgtaatcccagcactttgggaggccgaggagggcagatcacctgaggtcaggagttcaagaccagcctggccaacatggtgaaaccccatctctattaaaaatacaaaaattagccaggtgtgatggcggggacctgtaatctcagctactcgggaggctgaggtaggagaattgcttgaacctgggaggcagaggttgcggtgagccaagatcacgccaccgactctagcctggccgacagagcaagactccgtctcaaaacaaaaacaaaaacaaaagacaatgttgagtggtgggtcttctgctttaacccctccaacacctctgactcccgccttgtctccctccagccatgcgggttcccaccctccagcctcagcctgtccccatctgtgtccctcagactcagaggtgtcctccccagagacgcagacatgggcctctgccaccctgtattacagtgccctgcagtcaccgcctgcctgtgcatcccttgccatgctgtgacctcttgtgtctctgttttcttcttggtaaaacggggatacctcagagggcagctgtgcaacaggacaaattcacacacgagacactcgggatgctcctggcacacagacagggtgaagcatcccttgtccccattgtcaccttctctattagctcgggctgccataacaaagtgccatagactgcgcggcttacacagcagaaatttacttcctcctagttctggaggccagaaggccaagatcaaggtgccagcgaattcagtttctgtggaaattctcttccgccttctcactatatcctcacagggcctcttctctagacatgcataaagggagacagatccctgctgtctctctctttttttttttttttctgagacaaggtctggctctcttgctcaggctggagtgcagtggcacaatcccggctcattgcagtctcaacctcccaggctcatgggatcctcccgcctcagcctcctgagtagctggggctacaggtgcgtgctcctgtgcccagctactttttcgattttttttgtagagatggggtctcgctatgtcgcccaggctggtcttgagctcctggcctcaagcgatcttcctgccttggcctcccaaagtgctgggattacaggcatgagccacaagcgccggcctctctcttcttattgggataccagtcctctgagagtagggggccccacccttaagatctcatttaaccttaactacctccctcaagggcctacctccaaatacactcacgctgggagtcagggcttcaacctctgcatttgggagggaggtgggaagatacaatttagtccataacctcatccatcccatccctgctccatacttttacttgaccactcctagagttcctttattttattttatttatttatttattttttgagacggagtttcactctgtcgctcaggctggagtgcagtggcgcgatctcggctcactgcaacctccacctcccaggttcaagcaattctcctgcctcagcctcctgagtagctaggattacagtcacacgccaccacgcctgcctaatttttgtatttttagtagagatgacgttttgccatgttggtcaggctggtcttgaactcccaacctcaggtgatccacctgccttggtctcccaaagtgttgggattacaggcgtgagccactgctcccggccttttctttgttttgttttgagacggagtcttgctctgtcgcccaggctggaatgcattggcgtgatcttggctcactgcaacctccgcctcaagtgattcaagaacctcgagtgattctcctgcctcagcctcctgagtagctgagattacagtcacaggccaccacacctggctaattttcgtatttttagtagagacggggtttcgccatattggtcaggctgctctcgaactcccaacctcagatgatccacgcgcctcggcctcccaaagtgctgagattacaggcgtgagccaccgtgcccagccttctagattttctttctactcccagaagaatggaaactcctgaggctggaacttggtttccccgactcctgtctcctggttccctgaacacacagtgggtccccaagcaaaaacttactgaagacaggggagtgactaaggacggcagtgaggatagctggagatggggcgtctgccctgtgacctgggggaccacgcctgacccccacaggcagggtgccattgccttaggggtacagacagagttccccaggagcacgacgccctctccccagagtggctcccctaggaagctccagacacccccaggaaccagcctcagcttggcaggtggtgggtgtcccccgggagacccaggcctgaccatccctgaggcctctggagggggaggattgaaatatggccccccgcccccaccgccaaaaaaaaaaaaaaaaaaaaaactcaggctgggcacagtgcacagtggctcacacctacaaccccagtactttgggaggccaaggtgggaggatcacttgagccctggagtttgagaccagcctgagcaacatagtgagaccccatctccacaaaaaacacaaaaattagccgagcacggtggcacgtgcctatagtcccagctactgggaaggctgaagggggagggttgcttgagcccaggaggttgaggctgcagtgagctctgattgcaccattgcattctagcctgggcaagagagtgggaccccatgtcaaaaatacaaaagatatgttgaagtcccaactcctgataactcaaatgtgactgtgttgggaacatctggagtccttacagagataatcaagttaaaatgaggtcattagtgtgggtcctaatccaacaactgacgcccttatacaaaggagaaacctggacacagacatgcacagaagaccatgtgaccatgaaggcagagatcagagtgatgcttctagaagccagggaagattgccagttaatgaccaaaagaagccaggagacaggcctgcaacggattctgcctgaaggctcccagaaggaaccaaccctgacaacaccttgatcttggacttccaacctccagagctgggaggcgacacaattctgttgttggctgcagtggctcacgcctgtaatcccagcactttgggaggccaaggcgggagaattgcttgagcccaggagtttgagaccagcctgggcaacacagtgagaccccagctctacaaacaaatataaaaaagtagctgggcatgatgggatgcacctgtagtcccagctgctcgggaggctgaggctgcagtgacctgtgatcgcaccagtacacttcagcctgggcaatagagcaagacctcatctctgaaacataaacaaaaaaaccaataaagtctctgttgctaaagctgtcccgtctgtggtaatttgttgtgggagcctaggaaattcatatagggagtcaggacacaaagagagtgaggagggaggcagagatgggggcaagggcctgagccacagaactttaaagaaaccatttacaggaaacagcaaacgacagggtgagcatctagctgggctctccagcaaggaaccacctgagatgcctgggacagtgacggacagctccaagtgccagcccgagcagcttccacgtgtaactcatgtaatcctaataaccatttaggaaggagagatgcttgtacccacagtttacagaggaggaaagtgaggtcctgtcattgaagagatatacccagggacactcaactggtaagggggcttgaacccagggagggctggctccccaggttgggcttggtgagctgtggggggatcctggggggccagaagagcccccacccccgggcccacactgtatttgagtgtctatgcaacctcagagctggtcacgcctggacgttctacacctgggaagccaggtgagcccacacctgtgtccgtccccaccttgcacctcagtagtctctggtcaccttatttgtctttcttttttctttccttctttcttctcttttttttttttttcctttgagacagcaggatcttgctgtgtcgcccaggctggagtgcaatggtgcactctcagctcactgcagcctcatcctcccaggctcaagtgatcctcccagctcagcctcccgagtagctgggactacaggcacacaaaaccatgcccggctaatttttgtgttttttgtagagatgaggtttcaccatgttgcccaggctggtcttgaattcctgggctcaagcgatcctcccgcctcagcctcccaaagtgctgggattacaggtgtacccaggaatccattgcacccagccataggcgaccctatctcacccatgggaaacggggctgcacacctgcctgtatgttcgcatctaagccctgcgtctgtctcaagtcaagggtcggtgcggcagggtgggccactgaggcccagactctgtcctcgggtgccctgtgatggggatggggagagcaacaggaggagaagcggctgctgggggagagggggcgcctctagcctgccctagcctgcagttgccatggcaaccctctgcgtgctcgagtgggtgggagtctgagtgccttgggtggggggtgggggaaccaaggtggggatctgggatctgggcccccttcatggtctcctcccttcctggcagcagccggcccctccacacacagccctctggctgcatctcctgcctcctgcccactccccaaacccagccgcccatgagcccgcctccttcaggaagccctcaggcatccggcaggtccataaggaagccgcaggccctggggtgactatgaaggatcagctgagagttgaagcccctgaatttcaatctgctgtgtagcttcagagcaagcacttggcctctctgaacctatttccccattgctgctcagggactaacagacctacctcgcagagacagagcacgtgcccagagagggcccaggtacatgatcctcgggcagggcagggttctcacagcatctccagtccctgccccatcctccagctcagtggatggcagcccagtccctccaggggctcaggaaccggacagtcatcctggatccctctcccctcacatcacatccagccccgtcaggtcctgtggctactccttcagagtccactcacctctcgccactcctcagcttctctggtccagccccatcatctcctggctggaccccacttccccacctcactgtctacacctcgtctccctatctatctgccacccctgtcccatccaatctctacctcgaggcgagaacaatctttgcaaaatgaaactgtctacagtatgtttcccccagggccaccagagggcgcgtgtgagcatctaagtcagccgcttccctcctctgctcagaaccctccgtggctcccacctcactcgaccaaaagccaaagtctgtatcatacaaaggctctgcactgggccggatgtggcggcgcacacctgtaatcccagcacttcaggaggctgaagagggctgattgcttgggctcagaagttccagaccagcctggggaacatagtgaaaccttgtctctgccaaaaatacaaaaagttagccaggcatagtggcacacgcctgtgatcccagctcctcgggaggcttaggtgggaggatctcttgagcccgggtggtggaggttgcagtgagctgagattatgccactgcactctagcttgggcaacagagcaagaccccatctcaaaaacaaaaaacaaacaagccctgtacaatgtgaaacaccaggcactgttctgccttagggcctcttcacgggctgtttctctcttccccagatcccctcacagctcctcctgcatcttccttttggtctttcctcaaacatcactagttcagcaaggtcctgctggcccccacactcctacaccatgtcctgacttgatttctccatacctatcaccagcacgccatgcattttatttgcttatgaactctctgctactagatgctggctctgcagggtggggtttgcatactacactcagcacagcgcctggcacaagcaggaagctgaaatataattgttcaacgaagaaccttttaaaggtcaccctggagctgggcacagtggctcatgcctgtaatcctagcactttgggagaccaatgcagaattgcttgtgtccaggagtttgagaccagcctgggcaacacagtgagatcctgtctctacaaaaatttaaaaattagccaggcatggtggcacacacctgtggtcctggctactcgggaggctgaggcagcagggtcattcaagcccaaaaagtcaaggctgcagtgagctatgatcatgccactgcactccagcctgggtgacaaaacaagactccgtctctaaataaaataaaataaaggtcaccccggccaccaagcagcactggactgcagaggggtaggggtcgttcaaaaaattccctgcccccgcccccaacaccttctccctcatctccccatctatctgccaccccgtcccatccagtctctaccctgaggtcagaacgatctttgcaaaatggaaatccaattacacccctccctgcctacaaccctccatggctccctattgcctgtgatgctctaacatggcatctcaggccctgctgtcctgccaccttcccatcacttctactcagcgtctgtctctctctcacacacagttccttattctgctctccctccaaagggctctgcccagaggacagcattcgtatctctcatatccactctcacagcacacagggtctctgtgttttgctcccctaactggacttgggctcagctgttaaatgtctgtcttccccaccatcgagggactctgacgggaaagtaccattgtgggttgggctggctcttgttgcatacccaaccctgggcaaggagtggatgcttattcatttgtttaatgaatgaagatgaaatagacccaaaaagcagatcatctattcagtggatgtttaccgagttcccaactggtcacaagtgcaatggaggaaggtgtgcttgacagggggtatacatgtaggtgcaactgtagacagggtggccaggaaatgcctcccctaaaaagtgacatttcggcagaggtcttgaggaggtgagccatctaggtacctgtgcaaagagcattctgggcagaggaaacagcacgtgcaaaggtcctggggtaggaatgtgctgagatgtggctggggccctgcaagcaaggggaagagtggaaggaggtgagggcggctggggaggggggtcacagaggccatacagggccttgtggacctcagggaggactttggctttctagagaggtgggagccatcgggaatcctgaacagagggatgggatctggctcgggtgttcacaggtgtcctctggccgcagaggtggagatcagactgtgtgtggggagggttgctgggagtggagggtactctctaccccacctgtcccttgccttttgtccacagggctgtcaaagccagaaacctgaagcttccaccaagcactggctgcttctggcccccaccttgctggttgcctcctggcctcccttctggcctcctggcctcccttcctgccaactatggctctctcccacgtagcagctagagggagctcatgctaaacattctcaccctgccatctggatcctgacgcaaaccccctacctctacccccacccctgccacaggccctggcagccccacagtcacaagtccagccagcagcctccagcttctctccacatgcagttgtgaaacatttctccttcctcccctttgagccaccatcttctgtctgacctcagggcagcccctctctctcacagatgctccttcccctccaccatacccctcctccccctccaggttgcagctgggaagccccctcctccgggaagccttccctgacttgcaactctgttgcgctcaccatcatggcacgtccacaccacagtggcctgtggtctgtttccactccaaagtgttcactgtccagccccaacctttgcactctgagctcagcagagcagagctgaaaagagttctagaagctagggcccgagcagagggcacagaggcgggatccccctgcctcatcagatgctggcaggtaaggggcagggtaagaccaggagacaggggcatggtgcctagcagggcaggagagaagaggcctccggcatagcgcccttaagttgcaggttcaaatccaggctgtgcgccgtcatgtcagcacgacaggacacccacgtcactcctctcaattctgtctctccacgggggagctggggaacgagagcctcccagggtggctgtgggggttagaaataattttcggcaattccacacatcttttttggagcatcttctatgtgccagacactgaggggctgggtacaaaaaagtcgattctatagcgtaccagtgttgtgaaagaagataaagccaggaaaagtggctatgagtgtgtgtgggtttgggagtgtgtgtgtttttttttttaatcgtatttttagagacagggtcttactctgttgcccaggttggagtgcagtggtgggatcatagctcaccacagcctctgagctcaagggatcctcctgcctcagcctcccaagtagctgggaccacagggcgtgtgccaccgtgcccagctaatttttaatttttttgtagaaatgggggcctcgttatgtttcccaggctggtctcaaactcaagcgatcctcccgcctcatcctcccaaagtgctgggattacaggcacgagctactgtgcccggctgttgcaattttattttattttatttatttatttgagacagagtcttgctctgtcatccaggctggagtgcaatggcgtgatcttggctcactgcaacctctgcctcccaggttcaagcgattctcctgactcagactcctgattagctgggactacaggcactcaccaccacacccagctaatttttgtatttttagtagagacagggtttcaccatgttggtcaggctggtctcgatctcctgatctcaggtgatccacccacctcggccttccaaagtgctgggattacaggcatgagccactgtgcccggctgttgcaattttcaacaggatgatcaggaaaggccatctcccctggagaagatgacatttcagcaaacccctgtgaatttgagagaggagcacgcaggtgttcagttcaggagagttagaagagcatcctgggcagggtcacagcccgtgcaaaggccctggggctggaccgtgcctatatgtttgaataacggtggcagctgcatcgaggaagcgggttgtgagctggtgaggagagtgggaggaggtgagagcagggaggtgccgggaacagactgtgcaggactcgccttgtactttaaacacacaactgctccccaaatggggccgcccctctgcccagccttcactcccagaagccactagggggcgttctggggcagggtcggccaaccatggtcaggcccccgcctgcctttgtacagctggtgagctaagaatggtgtttacatttttaaaggactgaagagaagaagagaaaagagaacaggccacagaacccgtctgcggcccgcaaagcttgcaggatttaccatcgggctttctacagaaaagtcagccaacctctactctattttatttacgtatatatttttttgagacagggtcttgctctgttgcccaggctggaatgcagtggcgcgatcacagctcactgcagccttgacctcccagctcaagtgatcctcctgcctcagcctcccgggtagctgggacgacaggcgtgcggcaccatgcccaactaatttttaaattttgtattctgtaaagaagggggtctcgctttgtcgcccaggctggtcttgaactcctggactcaagtgatcctcctgcctcagcctcccaaagtgctgggattacaggcgtgggccactttttcccactggcaacctctactctacagccatcactgccaacccaggacaattctgcccctgatcccagtatgtttagcaatgtctggagactttctgaggtgttacgactgtggggctggaggtgtcactgacatccatcgggaagaggctagggtggcctctgagcatcctatagtacagaggacagcctcccacagagaatgatgcagtgccgaagtcaggagtaatggaaatcgtctaggaaatcctgtctgggaaagccagccccggacccctcacctcctcaagggataagaaggagaatccatctggcttcctgacctgatcatttgtgacctgcagggtatttttagcctctgagggaggggcactggctattctgagtttttttgttttttttttttggcggggtgggggggggcaaggttatttttggcctgggcatctatttattgaatttttatctccccccaaattttggaacaggagacagtgaaggcaggggcatttttttttttttttaagagtcaggatcctgcttcgtcgcccaggctggagtgcacttgtgcaatcatagctcactgcagcctcaaacctctgggctcaagccatcctcccacctcagcctcctgagcagctgagactacaggtacatattcacgatgcccaactattaaaaaaaaaattttagaaacgagtcttgctatgttgcccaggctgatctcaaattcttgtcctcaagcaatcctcccacctcggcttcccaacattctgggtttacaggtgtgagtcaccacacctgggtcaggtaagacttcttgaacgcacactgtgggccagtgatgactgttgacacctgggattcccaaagcaaagcaaatcacaacatcctcgcgcgcttggatcctcctcacagacacagacagtaaacaaacaagcgcagaacatcaggaaattacagactatgtgaaaagccgtccgctgtactgaacatcaggaggggtgtgggaagctgagactttgcagaaggtgcctgggagtaaacgttactggggaggtgatatttcaagagggtgggggagaaaaagcctcgaaaatatctggggaagggtcctccgtggcagaacagccagtgcaaacgccccggggtaggatcacacttagcacactggacgagcaacgaggagggaggagatggcccagaaagaccatgaagggccagaccccaggacagtccaagcctgtgggctactgcagtcagagtttggggctaccctcgaaaagaagacacacatgccttctccccaactcacatgacaggagagttttgcttttttgttttgggttttttttttttattgagaatgagtctcgctctgtcgcccacgctggagtgcagtggcacaatctcggctcgctgcaacctccgcctcctggattcaagcaatcctcccgcctcagcctccctggtagctgggactacaggtgcacaccaccacgcctggctaatttctgtacttgtagtagagatggggtttcaccatgttggccaggctggtctcgagcccctgacctcaggtgatccacccgcctcagcctcccaaagtgctgggattacaggtatgagccaccacgcccagctgataggagagctttgatggaaaccccatatgtgttgctagagtgtgagctccatgaggacaggacatggccaccaccccccatggcgccccctgcatggtgctgggtggggaggcaagtgtgtgcagattgcatgacaaggtgcacccagccttgctccaagaagtcctgagcacacaactgcaggtgcacaaaagatgcagacagccccatgtgtgcacacagacagctactccttcttgcagccctgcctcccccagcatgaccaccccctctgcaaaacacaaacaccagcacaggagggacctttatgaacaccggatgagtctgatggtcacgtggccacatgcacccttggctagatcaccatccaggccacacaggcagaggacacctatgcacaggtgcagacagacagacagacatctggattctggggacaccgggaccccctccatgtttctacttggcctcccacctcactccaggacccgtctctccccttccatcagggtgcccaatagcaaccactttgccccaaacccagcctgggaggagctgtctgtcttgccacggcaccttcagggtcactggggtcagggtttcagacccagggaacccccgcctcaggagcccctccccctgcctccccacagaggggctggaggaggggaagtgtctggcatctggaaatcagatccgtgagaggaacccacacagaaacgagagccttgtgtgtccttggccacatgtctcgccagggagaaaggagggggtggagggcaaagacgatgctctggcggggatggcagtgctcccactcctcccgttcctcttgaggggcacccactgccaccctccccaccgagatgcctgcgctggggctgaagcaacacatgctctgccaccagcctggcagggtagggaggacgcagacgccccgagatgcaagcgtcacacagcctcacatgcaggtggagaggccacccgccaggagcccaaactgctggatgcaaacacactcccgtgcagctgaggcgcctgtaggctcctccccaacgtgcccacagggtcctccaaggccccccaggagaaagggctcccctgggcaggctgggaatagaagctgggcttcgagtcccccccttccaccccctccctgcaggctccacagcccaggtgtgctggtccccagctccccatcctccccaagcctgggcgccagctacacccccaagagcaggaatcagcgtgggtgatcacggggtacgcaagcgcccagaagtggggattgagatgggcgccccttggagagaaagagggcctgcaggggtgtcccagagcagatgccacacacacatggggtggaccgagcggggccatgagggaggtcaccaagctgggtaggaagatggtggcaagaccagcaggagggccgggacccacatgtgagcgcacacgtatgtcgcacacgtatgtggctccgtgcacgggtgcgatcgctgccagccatggaattagttcccttttccgaattccagatgatttttcatctctgtaattaatgggcaagtcagttctgaacggcatggcagacaaattgctagttaggaaaatcacggataattttctcgatatgataatgaaggttgtaatccttctcttattctccctgttttcatcctacttttaagtaataaatttggcattagtgggaggggagcagggaggaaggagaagtcacctgccccccaaagctggggcctgacagggacccacgcagagtcccctgccgggggcagacaggagaagagaatgaggggtgtggaccctccgtggggttgatcaattcagggggccaggccctggagagcaggtggagggcacggagctttcaggctgtgagccagggtgaaggagtggggtctggggtcaggttagactcatgccagcccttggggtgttggagagagaagcagaaaccaatggtctgtccccaaacagcatggaggtcaacggcccggaatagacattcaccctcaggtgtgccccactggatccgacctcctctaagcagtgactccctaccaggataagggagccgggcaagcagagaggggaagagagaaagacagagagagatagagaaagacagagagagtgagagagagagagagagagagagagagacagacagagagagagagagcgcgcgagccagccatcttggcagccattttgaacccctccccctcctgcccccaggcacacatgttgggaagtgggatgtgggaagacagaccccagctctgagtccggtggaagccaggcggaagggggggccctgcctggaactgggatacagaaacacccacgcagctggcatggctgggggtggatgggggttggaacaggaagaaagggtccaggcaggtacagtgaggtgttggccagggatggggcagtgtgaggacccggactggaagtgtagagacaggggtgtgtgtagccagcggctgtcttcagatgggggccaggggtgcactggagagatacctgggagggcattttctggacacggctggagcaaacacagcatccccccaccccaccacttcaggcctggactcgggtcccaggaccgtcagatgggaggatgacaaccaaaccctcgcagctcaatccaatgcgcacctggggtgggggtggggagctgtcctcaaagcacgaataatccgagtggatcaaacctgccggcctcccgtgctttaacccggcaccacggagagaaggtgctgcccggctgcaccccctcctcctgacagcggcgccccccggactgcggccggctggacacccagacggacccctccccatcccccgcgccactgcctcccagagaaaaacaaccccctcgcccagcatcctgtggtgccagcccccgacacggctcctctggggcgcggggccggcgcgcggcgcgcacacgcaccccctccgctcacacccagacacctacacaaacagggcgccaagcacccgcgcgcacacgcaccggggacacgcaggcaccgccgcgccgcttccccacaaaggctggcgcgcgcgcgggcacacgcagccacgcgcgggcacactcgcggtcccctccccccgccaggcaccctgcggtagcccgtccgcacccccgcgccccgggcgctccgtgggggccgcccctcccaggcccctcgccagtgggggtgaggtgcgggctgcccccgacgcccctcccgctcaggtgcggtgccccgcgcggctcccgtgtcccctcccccctcgcggccaggacaggccccggcctcccatccttcccgcctcccctcttccacgcgccccgcacacctggcccaggtgcggcttcgcccctcgccctgggcccgcagacactcacctgtccagcgcctctctggggtcggcccagcgtgtctctcctgcggctcggcgaacccgggccccccgcccggcacatctcccggagccggggctggggggaagcgggtaggaggtggcgggacgagggcggcctccgtgtcccttccttcccctggcccagcaccgccgccgaccaaaaattaggaaaaaaaaaaaaaaagaaaagaaaagaaaaaaaagaggcggattacacggatccaaaggcggccccctcgcggcggcggaggctcgggactgggggcgatcgggtctgcgcccctcccggggagggaggcggtggggcgggggcggcgtcagagcgccgggggctggggcgaggcggagcgccccgaggcggcgccggcagcggcccgcatctcccccgcagctccgcggccccgacggaggcggcacgtgtgcgcccaggcgacttcccagccccctccgacgccggcggtggacgaggggttaacggggcagccggggcgcccctgcaggcccccgccgcccggcggcgccgctccggggcccgcgcggccccatcagccggggcctcctcggcagacggcggggcgggggcaccgcagcgccgacagctcccgcgccgacggctcgggctccccgcagtggccgcggggagctcgggttgggggcgggcggcgcggagctggcggaggggggcggcgcggctggaggcgggtgccgcggcgtcgcgcccccggtgcggccggagggggggcgccgggccgggcccgtgggcaccgcaggacgcgcggaccgagccggcgccgggcaccagcaatgacaagccgcctgctcgccccgctccccggcgcacccgctccgggaggggggcggtgggcgcgcgcaaaacccggcccggagtcgccgcccgggactggccgccgcaacccgcttgagcgccccaggagccggcccgaaaacccgggctggactttccttcctttcgcctcctctcgcctcctccctggaaaagcagggagagggaaagcgacgtgctggagccccgcgttggagcggggagtgggggaagggagacaggcgtaaggaagacccggagcggattttccagtgaagtataaggaaaggcgccgagcccggggaaggagggcgcaaatggggagatctggaagggttgtgcaaaacccgagttggattagataaagatgggaggaacggtgttggagcggggggttggggggtagatgcgacatggccaaatgcacccggggcacgcaaatttcgggccggattctttctcgggagacggagtaatgcgtcaggcctaacgcagtggaaacaagcaagacccggcccggaactcccgggacctgggttcgcatggtggggggttctggaagggggatgcttagtggctgaggcgacttgggctgccctcatcttcctggcagcgacgtgcaagggggacgggcaaaaggaggactggactcgggtacgaagggatttggcgcgctggctgcaccggagcggacaggtaaaagcggtttctggatccaggggcgctgcgaagggaatgcgatgaggccgctaccctgggagaccagacctacaataaaaggcgagggaggcacgcaaagccaggactggagcgcgggacgggatgagaccctcagcagaagatcctgggccaccgggacaggggcttggagctgaccgggcagcaggggcggagggaagcgttagggggaggtttgtacctgtaaacgcctcaaagtcttgcttttggggagggggtgcgaggggaaaaattgaattttatgttctctaaaagagtaaaaacccggcatggattttcaacacctaacaactccattgcagctggtggactctaagaagtagggcaagaagcaggcttgggttcccaggcatcagaccaagtgaggcgaggggcaggtttcgggttgaggctgcagagggagcccccgcaccccctctctggggtggggaaggctgttggacccggcttggctctctggagagcgaaagttatgactgccaagacctatagctggggctataaaactgggccccaagccaaaaataggcacttcggcagaacaggcaactttgtgcagggtgggggctggagggaaatggaagtgggaagaatcctggagtggagggaacaggggggagggggggagtccctgaagcggggctgctggctccattttatgaaagatgggaagactgatggctggggagggcttggaatcctcagggaagggaatccattcaagtgaggcccaaatgttaaagcagacagctcagagttcaaagttgggctgcatcttagcagcagggcagacaaaccctgatctgagttttagaggagggggacgggctgaggatggggatgggggaaacccccattccctatatgtccagggaagagagtgcattgctaaccatgcgctttgcagaatgaatgaggaaagggaaaagggttcctgagtaggagtggtaaatccacaaaacttgaggcatatctggatgggaaaaatgagtatctaagaaagcctgaattgaatatctgcacgggaattaacttggcctctaagaatcccttcctagaagcacgtccctgtggctaaactggaggaagtgcagggacaccagacttccaggctgcccgggtgaccacgcaccactgctgtggcagcctgtcaccctccaccgccttctacggacagctgtctcttcacgacggggaagggattcttgaaagccagaacctaggcaaatctggccccagagaacttcaaaatggagggatgggtcactttcgttcctccttcatgcccaggatttcatggctgcaaagctgtccagccttgaatctgggtggccaggttggacaccgggatctgggggaccaaatataaagtaggatttggtgagtgcaaaacggatcccatccatctgtggttgactgcagatccactgggtatggaggagggcatcccatctctctacgcctcaatttcccagtttgagatattgacagcaccaagtaagacccatgaaggctttgagatggagggcactccaggcagccagctttctataaacccagcagtaccgaaaagggaacagaacttgacgctcaggaaaagctggtcacctccttgttctcctgctccaggcctttgtccccaccccaccctccagccctgagcagcccacccacttccccctacagagctagcctaggaggtggttctaacttgcactctccagaggctacgagaaggagtggcctttacttacatgagggaaagcaacgacattctttaaggcaccctcagctcagtttggaaaaccccagccggaacccccctcacccccgcccctcgcccctttctagaccctctaaaccccactggtcccagctgggatcggctctccagcctccatctgatccatgtctcctggacttgtgagcggcgtgctcaggaggcaaagagtgcggaggggctggggggcgcgtaaagagccctggcgcccctcaggccttcggctgcgcagccgcagtggaggccgcgccagcaaccgggctccgggaaccaaggcgtccgcgcgcgcacgcagactcgcccgcgcgccgcgtgccccgcgctgcccaggtcggtacccgcgcttcggacaccctgctcccagggcgctcctcgcttccagcctcccactttgcgccttgggctccccatgagccccgctcctgagacaccccacgctctgtgtattccgtcccacgggacctccacgcccacggtgccacgcgcctcgagtaccccatgttctatgaaccctgcacctggacgccccatcttctgcgcaccctgtgctagagaacccgcacgcccagggtgccctatgcctagggcaccctgtgctctcctgcgtatctgggactccacattttgtacgcctagcacctccagcatcccagcgtcagacacagctgggctcgcctgtgccttgtctgtcccctctctgtgccttccatgtattgcgcccactgcctcggttgggcccccagcctcacagtcctgaaggctctgcttcaccccagtgctcagcttccctttgcctcaggcccagcgccctcgttcccgggtgccctgcctcaggctcctggacaggtcagggcaacgccagacagccactgtccaccaggcgcccccagcccctgttttcctagagcccattcggtataggatgcacaaccctgctgttcatttcactgctcggtgcacgtattcattccttccatttacgcctcaaacacacagcacgcaccttatatgctcttacctgtcaggtgcagtgtgatgcattgagaatgcgcctccagtgcacagggaacaaggcagggagccttctctgggcgctcccttcatcatggagaagatggactcagaatgtgtgatggaatgagccctggaaagtcagcaggtgccagggagtggaggatggacctatccaagccttgaggtgtgggtgaagttttgtgtgtccctggcctttccagaggctccctgtacccccatcttaggcaacttcttttatttatttatttatatttgtatttatttatttatatttgtatttatttatttattttgaggagtctcgctctgttgcccaggatggagtgcagtggcacgatctctgctcactgcaacctccctctcccgggttcaagtgatttccggctaatttttgtatttttagtagggacagggtttcaccatgttggctaggctggtctcgaactcctgacctcaagtgatccgcccacctcggcctcccaaaatgttaggattacaggcgtgagccaccgcgctgccctctttatttatttttagagacagggtctctctctgtcacccaggttggagtgcagtgatgaaatcatacctcactgcagctcactgcacgagccaccacacccagctaatttttgtttttttttttttcatagcttgctatgttgcccagactggtctcaaactcccgggctcaaatgatcctccttcctaagtctcccagagggctgggattacaggtgtgagccatggtggccggccaaccttgggcgatttctgagctccattcagttccacccccactgccaagccaagtggagggcaagataaagaggtcccagaattgggctaggaggataggttgggggcagggagtaattccaactgtgttctttttttttttttttttgagatggagtcccactctgtcatccaggctggagtgcagtagcatgatctcgactcactgcaacttctgcctcccagattcaattgattctcctacctcagcctcccaagtagctgggattacaggcatgcgcctccatgccaggctaatttttgatttttttttttttttttcagtagaaacggtttcaccatgttggccaggctggtcttgaactcctgacctcaaatgatctgcccacctcagcctcccaaagtgctgggattacagaaatgagccactgcacccggccaggtttttttgttgtttgttttttgttttgttttgttttgtttttttgagacgcagttgcccaggctggagtgcaatggtgtgatctcagcttaccacaacctccacctccggggttcaagccattatcctgcctcagcctccggagtagctgggattacaggcacacaccaccacgcctggctaattttgtatttttagtagagacggggtttctccgtgttggtcaggctggtcttgaactcccatcctcaggtgatctgcccacctcagtctcccaaagtgctgggattacaggcgtgagccaccgcgcccatcctcagggggtatattttgaaggtggagcagatggattggaagtgggatacgagggaaagaggtaagtcaaaatgtgtgagctgagtgagcccctggaaggatggagaggatggagaggaggcagttttgtaggttagatccaagcctttggtttgatatgtccaagtggaggcatgaagttggtgcccggggagaggttcaggctggccgagaaatggctcaaatgaacacgaatgctctcatttatactttatggtaactctgtgggtgggggactttctccccatcttatagaaggggcaacgaaggctccagaacatgcccaagtagttaaaaaatgtagttataggccgggcgcagtggctcacgtctgtaatcccattactttgggaggctgaggtgggcagatcacctgaggttgggagttcgagaccagcctgacaaacatggagaaacccggtctgtactaaaaatacaaaattagccaggcatggtggcacatgcctgtaatcccagctacttgggaggctgaggcaggagaatcgcttgaatccgggagctggaggttgtggtgagccgagatcgcaccactgcaatccagcctggagacagagcaagactcagtctaaaaaaaaaaaaaaaaaagaaaaagttaggttctgagccgggtcccagatttgggctgggaggatagggtgggggcagggaataattccaaccgtggtctttttcttttctcactctgttgtccaggctggagtgtagtgactcaatctcagctcactgcaacctctgtttcctatgttcaagcaagtctcctgcctcagcctcctgagtagctgggacgacaggcatacaccaccatgcctggctaattttgtatttttgtagagacagggtttcacaatgttgcccaggctgttctcaaactcccaggctcaagcgatcctcccgcctcggtctcccaaaatgctagcattacaggtgtgagccactgcgcctagctaggcaggactatttgaaaggcaccagggctaggctagcatggtgggaggccaggagagggtctagattatattcccagtgatactaggaaccccaagagggctttcagaagtgggtggcatgatcttatttggatgtttaaaagattatagggctgggcttggtggtgtgatcctgtatcctagctgaggcaggaggattcacgcacacaggcttgagcctaggacttctgggaggtggtgtgtgccatgaccatcggcgtcaatgtggtgaccccccaagagcaggggaccaccaggttgcctaaggaagagtcaactggcccaggttggaaacagagcaggtcaaaactcctgtgttgatcagtagtggaatcacgtctgtgaatagccactgcactccagcctgggcaacagggtgagaaaagaaaaagaccacagttggaattattccccgcccccaacctatcctctctaaaacctcccaaccctgtctctaaaacaaaacgttaaagtaaaaataaataaaataggccaggcacggtggctcatgcctgtaatcccagcactttgggaggccgaggctggtggatcatgaggtcaggagatcgaaaccatcctggctaacacagtgaaaccccatctctactaaaaatacaaaaaattacctgggcgtggtggcgggcacctgtagtcccagctactcgggaggctgaggcaggagaatagtgtgaacgggggaggcggagctttcagtgagccaagatcatgtcactgcactccaacctgggcaacagagcgagactctgtctcaaaaaaacaaatcaatcaataaaaataaataaataaataaaagattatatgagtgctccctcaataacacagaattactatatgaggcaggaaatggggagtgactgctaacaggtgtgagttttctttaggggatgatgaaaaacgtcttggaactagacatgatgaatgtactatgacatgacacgacatcgtccaccttaaaatggttggtggttaattttttgttgtgggaatttcagctcaattaaaaatgctggccgacgggcgcggtggctcacgcctgtaatcccagtactttgggaggccgaggtaggtggatcacgaggtcaggagttcaagaccagcttggccaagatggtgaaacaccgtctccactaaaactataaaaattagccgggcgtagtggcgggcgcctgcaatcccagctactcaggaggctgaggcaggagaatcgcttgaacccaggaggcagaggttgcagtgagccgagattgtgccactgcactccaacctgggcaacagagtgagactctgcctcaaaaaaaaaaaaaatgctaggggctggggcacggtgtcttacccctgtaatcccagcactttgggaggtagaggctggcaaatcacttgaggccaggagtttgagaccagcctggccaacatggagaaccccatctctactaaaaatacaaaaaaagttgggcgtggtggcacatgcccgtagtcccagctactccagaggctgaggcaggagaatcacttgaacccaggggcagagtttgcagtgagctgagatcgcaccactgcagtccagcctgggcaatagagtgagatgccaaaaaaaaaaaaaaaggaaggaaggaagataagaagggaggaaggaaggaaggaaagaaaatgctaggaatgctggtgtgctcttgtaatcccagctacctgggaggctgaagtgggaggatcacttgagcctgggagttagagactgcagtgagctgtgactgcaacactgcactccagcctgggtgaccgagcgatacccctatctcttaaaatatatatatatatataatttattgattattattatatattgtatatattatataatattatatattataatattatatataatattatcaaaaaatattgatataatattatcaataaatatcaataaaataataataatcaatatatataattgattatatatattatatatattatatatattatatataattgatatatataatatataatatattatatattatataatataatatattatatattatataatattatatattatacattatataatattatatattatacattatacattatatattatacattatataatattatatattatatattatacattatataatatatattatattatatattgtataatatatattatattatatattgtataatattatatattatattatacattatacattatatattatacattatataatattatatattatattatatattgcataatattatatatcatatattatatatataatatataatattatatattatatattatatatataatattatatattatatatataatatataatattatatattatatatataatattatatattatatatataatattatatattatatattatatattatatattataatatatattatatattatatattatatattataatatataatattatatattatataataatatataatattatattttataatatataatattatatattataatattatatattatatattataatattatatattataatataatatataatatataatatataatatataatatatattatataatacataatataatattatatataatatataatattatattatataatattatatataatatataatatataatatataatattatatattataatatataatatataatataatatattataatatataatatataatataatatattataatatataatatataatataatatattatacaatatataatatataatataatatattatacaatatataatatataatataatatattatacaatatatagtataatataatatataatataatatattatactatatatagtataatatattatataatataatatattatactatatatagtataatataatatataatataatatattatactatatatagtataatataatatataatataatatacaatatatagtataatataatatatattatataatgtataatatatactgtataatatataatatataatgtataatatataatgtataatatatattatataatgtataatatataatatattgtataatatataatatatattatattatatatatcaattatatataatatatataatatatataatatatacaatcaattatatatatattgattattattattttttaattatacaggtcagccgggcgcagtgactcatgcctgtaatcccagcactttgggaggtcaaggcgggaggatcgtttgagcccaggagttcgagaccagcctgggcagcatagcaagacctggtctctaaataaataaataaataaataaataaattatatagtcaatttgagagggagccaggagattcgcgaggtgatcaccactgtcatccaggtgacaggcaggtgatggaggcccagaacaggatgctggggggaaacgttaggttttgggcatgtcttaggggcagagtcaacaggaccccttactttgcaccctccttgaactctgctcatgttacttcctgaccactctattgaaaatgcaaaacacaggacggggcgcgctggctcacgcctgtaatcccagcactttgggaggccgaggcgggtagatcacgaggtcaggagctcgagaccatcctggctaacacggtgaaaccccgtctctactaaaaatacaaaaaattagccaggcgtggtggtgtgtgcctgtagtcccagctactagggaggctgaggcaggagaatggcgtgaacccgggaggcggagcttgcagtgagcagagatcacgccactgcactccagcctgagcgacagagcgagactccgtctcaaaaaaaaaaaaaaaaaaaagaaaagaaaagaaaatacaaaacacaaaaattagctgggtgtggtggcgcatgcctgtaatcccggctacttaggaggctgaggcacaagagtcgcttgaacccgggaggtggaggttgcagtgagccgagatcacacctctgcactccagcctgggcgacagagcaagactctgtctcaaaaaaaagaaaactgcaaacacccccaccctcctcactcccttgatctcctctcccctttatctctctccagtcccagagatgtggggggggggggggtctcgctatgttgtccaggctggtctcgaactcctggtccccacagcatatcctgacctagtttcgttttcattcatttatctgtctccctcactagaataccaactccccagtccagagatgtttgtttcttgttcactgctgtctacccggagcctaggaccgatcctggaacatagtaggcgctcaggagaaagcgggggagtggaggaaagcgagaatcccggaagccgccgggttccagcctgagcagcaggcgggcgtttaagtggaggcggattcctagttaggcaccagctgaaaggggagcccggctgggctgcgcttccttccccggccgctaggggccgcttccccgctgctctgcggccgccaggtgagggggccccgccccttctccccaggtgctcagggagttggggtgtgaggggacaaagtgggggtgaagggagagagctgagcgtgtttgagatgggggctgcttaaaggaagggaaaaatgcgtagggaggttgggaggtgtgagaaggtgaggagacagcccggtgttagggagagaggagcggagagttgagggaggtgcgggaagatgggtgatcaactggggagtccgggaaagtctggcaggcggaaggccttgccctggtggctccactggaggaaatttagaccatgcatggaaaagaccgggacgattgaggggtgggattggcctgtggggttgaggatcccagggaagaagccctaagctttgctggacttggacttggccagtgtgttctggggaggaagagggatttctcagacccagatccctcagaccagcaacggggagggacttctcctttgaggagtgagatgtgcctggcaagctcaccagctagcttttgcagaacgtgtggccagtaagtggcttattcaacctggcactgactctgcctctctctccttcaagcctcagggccaggattcattgtgtaatgaattgagtggtgggaaaacagcaatgaatgagacagatccagtcccggcactggccagtcctggcacaaagaaggctgcccagccctggggaagtgacaggtaaactgaggcagggacctgctggctttaaatagcagtccccctcatggtgatctgggcagagaggaccactcatatggaggctctgaggctgttaccaagaaaaaagccggcaggatccaagctgcaatagtgtgatagggagtgttggggtctgcggcaacccagaaatgcctgccaggtctaaagggatcctgtgtttgggattaaggtggatgtgggggcttgcaggctctgtggaatggagataggttgggaagggggttgggaataggagtgaggggttataggtgggtcccagagaggtagaggtgatggccacgggaaggtagaaggtgactcctaaccttgcatgagctcatttcaggggacacaaagccaaatgctgaccagggaatgaaaatgcagaaattgggcaggtgtgaggcggtggtgaaggacagggtagctgaagttgcaccacccccccttttccttaggcacccgcttgctaccactcagctccagctgtgcgctaccacgtgggaactcaggctcaatgttgccaaaatagcttcttcaagagaagccagaaatcacggttgttgcgcaaaattccctgagctttaaatatcccatggggatctactaaagttaaattgctgccacccagcaattccattcctgggttgattcccagtgggaacaggagcttagggtcacctaaagacatatccatggatgtgcctagcagcttcattcatgatcaccaaacaccagacaccccttaagttgaccatcgactggcaagtggaaaagaaatgggaggacattcttataatggaatataacgcagcaatgaaaaagaatatactactgacgcattcacagcatggatgaatcccagagacataatgttcagtaggagaagcaagataacaaagagaataccccgagtgatttcattctgtgttgttcaaggccaggcagaagtaacctatgaaaagagttggggaagcccagggtttccttacttcggcctcattgacatttgtggctaaatgatcctgcgtgatgggggctgtcctgtgcactgtaggacgttgagcagaatccctggcctccaaccattacgtaccagcagcaccccccagttgcgacaaatttctgttgttaggggcataatcaccatcagatgggagccactggtccgggtgtagtggctcacacctgtaatcccagcactttgggaggccgaggcgggtggatcacttgaggccaggagttcaagcccagcctggccaacatggtgaaaccctgtctctactaaaaatacaaaaaaattagccagacatggtggcgtgtgcttatagtcccagctacgtgggaggctgaggcaggagaattgcttgaacccaggaggcagaggttgcagtgagcaaagaaagatagcaccactgcactccagcctgggtaacagagcaagactacgtctcaaaaaaaaaaaaaaaaaaaaaaaaagccactggcttggtgatgttttgaggcagcccacttcctggaaagtagcccagggagcctcctgggagactggactgttcttgatcttgaactaggtgacagtgataagggtgaaatgtatttcaaaaatccacggacctgtgctcctaagatttatgtgtttcacaataaagacattaactctacaacatggatgacccttgaaaacatttggaaaagggaaagaagccggacacagagggtcacatagtgtatgacttcctttatatgaaatgcccaaaacaggtaaacacatagggacagaaacagattggtggttgccaggggatgggggatggggaatggagattgactgctagtggggatagggcttcttttgggggtgatggaaatgttctgtaattagaggtgatagttgcacaactctttgagtatacaaaagtccagtgaattgtacattttaaaatgtacaattggggccaggcacagtgactcatgcctgtaatcccagcactttgggaggccgaggcgggcagatcacttgaggtcaggagttcaagaccattctggccaatatggtgaaaccctatctctactaaatatacaaaaattagccaggcatggtggtgcacgcctctagtcccagctactcaggaggctgaggcaagagaatcacttgaacccaggaggcagaggttgcaatgagcaaagatcgcaccactgcactccagcctgggtgtcacagcaagactctgtctcaaaaaacaaaaacaaaaaaatgtacaattaatcttggctgggcacagtggctcatgcctgtaatcctaacactttgagaagcagaggtgggaggattgcttgagcccaggagtttgagaccagcctgggcaacatagcaagaccccacctctacaaaatttttttttttttttgagacagagtcttgctctgttgcccaggctggagtgcagtggtgcgatcttggctcgttgcaacctctgcctcccaggttcaagcgattctcctgcctcagcctcccaagtagctgggattacaggcgcgtgccactacacctggctgatttttgtatttttagtagagacagggtttcaccatgttggccaggctggtctcgaactcctgacctcaggttatccacccacctcagtctcccaaagtgctgggattacaggcgtgagccacagtgcccggcgaaaattttttttaattagctgggcaacatggagcctgcctgtaatcccagctacttggaaggctgaggtgggaggatcgcttgaccccaggagtttgaggttgcagtgagctatgattgcaccactgcactccagcccggggaaacagagagagattctgtttctaaaaataatataaaataaaatggcgagtgttacgttaggtgaattttattccaaaaaggaatttaaaatttttttttaattttttttaaaaaaggaattttttaaaaacaaggagttaaccacacaggccaaacaacacatctggggccagtttggccccagggctgccgtcatttgggaatggagggaaaggaaggggacggggtgggggggtgggagggtaatgcaccatccaggagttgtgggcgttcttggtgaagggtgggggatgacgcaacttggaggcaaaagaaagtatgtctcggctcaggggagcgctccctcttaacccaacctgtcagccctggaaagaaatcagctacgggtcggaggccagccagcgaactgtcaaggaagtgcagagttctgacgagttagagaaatgacaaccgctcagccccgcccggcctgacaccctggcggtggcatgatgaagtggtgcttgccgggtgggcggaggatgctctctgcgagcttgcgggaaagtgggggtgctcacccgagttcttctgcagtgtgaagagaggtgggttcggcctccctggtaacaaagggcggacggggtggcatttgcccctacccatccctcctggagggagagccattcccgtgggtgcaaggaagagagaagacagcgggcttctgggggcacggctgggggtgcagggtctgagtctccgttggcttcaaaaaactgaatgatggccgggcgcagtggctaacacctgtaatcctagcactttgggaggctgaagcaggcagatcaccggacctcaggagtttgagaccagcctagccaaaatagtgaaaccctgtctctactaaaaatacaaaaattagctgggtgtggctgcaggtgcctgtaatcccaactactcgggatgctgaggcaggagaattgcttgaaccctggaggcagaggttgcaatgacccaagattgcaccactgcactccagcctgggcaacagagcaggactccactcaaaaaataataaaataaaataaaaaactgaatgagtgaagagagacaaagaaaattaaggaggccaggcacggtggctcatgcctgtaatcccagcactttaggaggctgaggcgggcagatcactggaggtcaggagtttgagaccagcctggccaacatggtgaaactctgctctaccaaaaagtacaaaaattagccaggtgtgatggcgggccctgtaatcccagctactcgggaggctgaggcaggagaatggtgtgaacccgggaggcggagcttgcagtgagccgagatcgcgccactgcattctagcctggacgacagaacaagactccgtctcaaaaaaaaaaaaaaaaaaaaaaagaagaaagttaaggcctcccgagtagctgggaccacaggcgcacaccacaacacccagctaactttcatattttttgtagagatagggtttcgctatgttgcccaatgtggtcttgaactcccggctcaagtgatcctcctgcctcagcctcacaaagtgctgggattataggcgtgagccactgcacctggcctgcatataactttggacttcccaaaaacttaaccactgatagcctatggttgatcaaaagccttaccaatgacataaacaatccatgaactcgtattctgtatgttctatatattacatacagtattcttagaataaagtaagctagaaaaaagaaatggtatgaaaatcatgagaaagagaaaatgtatttaccgttcatgaagtggaagtggattaccataaccgtcttcatccacgagtcttccgatggaataggctgaggaggaagaggaagaagaggggttgtctcaggggtggcagaggcggaacaacatccacttacaaggggactcaggcagttatggctcaagcccgtgttgttcaaaggtcaactgtaatagaattttttctttttcttttttttttttgaggcagagtctcgctctgtcaccccggctggagtgtagtgacgagatctcggctcgctgcaacctcggtctcccgggttcaagcgattctcctgtctcaacctcccaagtagctgggattataggcgcccgccaccacacccggctaatttttgtatttttagtagagacggggttttgccacgttggccaggctggtctggaactcctgacctcaggtgatctgcccacctcggcctcccaaagtgcagggattacatgtgtgagccactgcacccagccagtagaaatgtattgcttacagttctggaggccaggaagtccaagatcaaggcactagcagatttggtgtctggtgagagcccactccaccccccaggttcaagcgattttcctgcctcagcctcctgagtagctgggattacaggtgtgcgccaccatgcctggctaacttttgtatttttagtagagatggggttttgccctgttggccaggctgttcttgaactcctgaccttaggtgatccacccacctcagcctcacaaagtgctgggattataggtgtgagccaccgcacctggccaagcgagttatttttattttatttatttgtttatttgagacaagatctggttctattacccaggctggagtgcagtggtgcgatctcggctcaccgcaacctccatttcccgggctcaagccatccccccacctcagcctcccagggagcagctgggactacaggtgcgcaccactacacccaactgattttttttttttttcagacggagtctcactctgtcaccaggctggagtgcagtggcgtgatctcggctcactgcaacctccgcctcccaggttcaagtgattctcctgcctcagcctcccgagtagctgggattacaggtgtctgccaccatgcctggctaattttctctatttttaatagagacggggttttaccatgttggccaagatggtcttgatctcctgacctcatgatccacccgcttcgacctcccaaagtgcagagattacaggtgtgagcgaccgcacccggccaatttttgtattttttgtagagatggggtttgtcatgttgtccaggctggtatcgaactagtgagctcaagtgatccgtctgcctcagcctcccaaattgctgggattacaggcgtgtgccactgtgcctggcctatttatttatttatttatttatccaatgtttgttttaagttcaagggggcacatgtccaagtttcttatttgggtaaattgtgttttgcaggagtttggtatacagataatcttgtcacccaggtaatcaccataacacccaacaggtagtttttcaatcctgaccctccttttaccttccaccctcaaatagacaccagtgtctgttgttcccatcttttttttttttttttttgagatggagtcttgctccgttgcccagggtagagtgcactggcataatttcggctgactgcaacctctgccttccgggttcaagagattctcttgcctcaccctccctagtagctgagattataggtgtgtgccagcacgcctggctagtttttgtatttttagtggaaatggggtttcaccatgttggccaggctggtctcgaactcctgacctcaagtgatccacctgcctcagcctcccaaagtgctgggattacaggcgtgagccgctgtgcctggcctgttgttctcacctttgtgtccatgtgtactcagtgtttaactaccacttataagtgaaaacgtgtggtatttggttttctgttcctgcattagttgacttaggagaatggcctccagctccatccatattgctgcaaaggatataatctcattctttttttttttttttttttttttgagacaatctcattctgtcacccaggctgaagtgcagtgtcgtgacctcggctcactgcaacctccgcctcccaggttcaagcaattctcctgcctcagcccctcaagtagctgggactacaggcacctgccaccataccctgctaatttttgtatttttttgtagagacggggttttgccatgttaaccaggctggtctcgaactcctggcctcaagtgatccacccaccttggcctccgaaaatgctgggattacagccatgagccaccatgcccggcctcattcttttttaatggctgcatagtattccatggtgcatatgtaccacattttctttatccaatcctccattgacgggcacctaggctgattccaagtctttgctattgtgaatagtgctgcaatgaacatacatgtgcatgtgtttttatagtagaacaatttatattcctttgagtatatacccagtaatgggattgctgggtcaaataaaatagaagaattttaaattgtttgagaaatctccaaactgtcacactcaattataagggcaataatctcacccatgagaatggggccctcctggcctaatcacttcccaagaaccccaactcttccaacatatggatttggaagggacacagacattcaaaccatagcagtgaccttatttggacaaagcgtttttgcagatgtaattaagttaaggattttgcaatgagatcatcctggattagggtggcccaaaatccaatgataaatgaccttagaagagaagggggttagacacagagaagaaggccaagtgaagacaggcagggctttcagcagtacagacacaagcaaggaaccatcagaggctggaagaaaaaaggacgaatcctcacctagtgccttcggagggattgcagccctgcaccaccctgattgcaacctctggcctccggaatggtgaaataataaattcttgttgtttccagccacctagtttatggtaatgtatttcagcagccccaggaaatgaacacaggccctgatatccaattccacaagcacttgatgaagcgtcaggaagggcccgtggtacagtggagggggagggaaactcgaaaatggggagtgttgagaaacggatggacagtgaggtggaggaccagagaggcttttttttcttttcttcttttttttttttttagacaggacctctcttcgtcacccaggctagaatgcagtggcgcagtcgacctcctgggttcaagcgatcctcctgcctcagcctcccgagtagctgggactacaggcacatgctatcatgcatggctaattatttatttattttttgtagagatggggtgtcactgtgttgcccaggctagtcttgagctcctggcttcaagccatcctcctgtcttggcctcccaaagtgctgagattacaggcttgagccaccatgcccagactggggaacctctttatagcagaggtgatgacccagaactgagctggagcatgccacaaacctacagggacagccagtaggtaatataaatacgccaagcagccaagataaaaagactgactgcaccagcaacggaacagcttcagtgtcagggagacagtaagggggggtgggactatggcaaataatgataagaatgagtaacatttatcagcacttgctaagcccgttccttatatagcatgaactcatttaattcagttgtgttttttttttttttttgagacaagtcttgctgtgtcacccaggttggagtgcagtggcacaatctcggttcactgcaacctccgtctcccaggttcaagcaattctcctgcctcagcttcccgagtagctgggattacaagcacgtgccaccacacctggctaatttttgcatttttagtagagacaaggttttgccatgttggccaggctggtctcgaactcctgacctcaggtgatctgcccatctaggcctcccaaagtgctgggattacaggcatgagccaccacgcccagacaagatttcatctttagaggaagtcaggcatccagatttttatgcaaaaatcacctgaggtctggcactggtggctcaggcctgtaatcccagcactttgggaggctgaggggggcgaatcacttgagttcaagagctcaaggccgcctgaccaacatggtgaaaccctgcctctactaaaaatagaaaaaaactagctgggcctggtggcctttgcctgtaatcccagctacttgggaggctgaggcaggagaatcgcttgaacctaggaggcagaggttgcagtgagcagagatcacaccactgcactacagcctgggcgacacagcgagacgccatctcaaaaacaaaaacaacaacaacaacaatgaaaaagcagcctgtatttaaaagctagcaagtcatgggccgggcgcggtggctcacgcctgtaatcccagcactttgggaggccgaggtgggcagatcacaaggtcagaagatcgagaccatcctggctaacacggtgaaaccccgtctctactaaaaatacaaaaaattagccgggcgtggtggggggcgcctgtagtcccagctactcgggaggctgaggcaggagaatggcgtgaacccgcaaggcagagcttgcagtgagccaagatcgcgccactgcactccagcctgggtgacagagtgggactccatctcaaaaataaataaataaataaataaataaataaataaataaataaataaataaaagctagcaagtcattacaaaatgtttttaaagcctgcatggaccaagccaattacatctgtgggctggattcagctctggggcggacacagagggaggggcggggcatttagtgaaggcgatgcaaagcatcatgggtgagttggggaccacatgggccagggggtttgactaggtggtgcctaggcgggtgccagcatgtttgtcggggctggcgcggtggagggggcgtggtttaaactgaacaggtgttttgggtctaggttggaaaggacctttggagccacgataacatttttcaattttgaagaagtcagtgatagcttttaaacagctgaatgactcagtcatgcctgtctgtccccatcccccaatcccaacacccagaaagctgtgaatcaggctttctttgggggtggagggacagtagatccatccatgaaggaaacaaactaaacagcccccgtcttccagcgcgctcacagccgccggggagagggggaaggtgtccttagtaaggttaggataggatggcagccgtgatggtgggaccgtggcagagggttagtggttgtctgcagatatgggagccactgctatgtgttcaatgcactaaggatgcaacgacgaacaggacagacatggccctgccttcaaggaaaaagactgtgaaggaggaaggaaataaggagagacggtaattccagggggtgatgagaaaatgtaaaaattaaaatagcaggatgggggatggggctcagatcggcagcctacaggcccaggagacagagcgggtgggcaggaggatggaggatggggagcgggggtcctcagtggctcacaagccaccgcttgctccctgggacccagcagcctggctgggcctctgtctccccagaatcaccctatcacaccaagaacaaacccacggctgacatagattcctgactccgagcccaagcaagggggagaaaggggaggaaaaaaacacccatctgttcttcctctgatggaatgtgatttttcacccagtgcttaaacctcgagcttctcctcccatttcctctcggcagccgcagcgaagcgatataaatcgctgtaaatgggttttcccggccggttgccgtgttgttttaataatggttcattttctgcctggggggaaaaatagttggtaaagaaattgaggagggggggttcattttgtgtgtgtgtgtgtgattgtgcgtgtgtgtgtgtgtgtgtgtgtgtcctgttgccttagagaagattcccgaatattccactgggacaccaagtgacccgtccagttggggaattggggaattgctggtcagagaaccagtgcatcccacttgcctggacaaaagggattcctttttttttttttttttttttttttttttgagactgagtcttgctctattgcccaggctggagtgcagtggtgcaatcccggctcactgcaatctccacctccctggttcaagcgattcttctgcctcaacctcctgagtagctgggattacaggcgcccgccagcatgcctggctaagttttgtattttaagtagagacagagtttcgccatattggccgggctgatcttgaactcctgacctcaagtgatctactcaccttggcctcccaaagtgctgggattacaggcgtgagccgccgtgcctggccgaaagggattcatttgcaaacctcctgggcacatatattaagcactaactgtgtgctatgcctgactaggtgcgtgggatatgtaaatgaataaatctcccaggccctgacctctctgggggctcacattctagaagcagagagagcaacattaagacatcactctgccaaactaggtaattacaattgtggaaactgctctgaggagactgttgagtgccacgggaatggaaaacggatcttggcagggctgggctgagcatggtggctcacagctacaatcccagcactttgggaggctgaggcaggaggatcgcttgaggccaggagtttgggaccagcctggacaacatagcaagaccaccaactctaaaaaaaaatttaaaaattagctgggcgtggtggcacatgccttctagtcccagctacttgggaggctgaggcaagaggatcacttggacctaagaatttgaggctgcagtgagctatgatcatgccattgtactccagcctgggccacagaaaaagatcccatctcaaaaagaaaagaaggctgggcatggtggttcatgcctgtaatcccagaactttgggtggccgaagtgggtggatcacttgaggccaggagttcgagaccaaactggccaacatggtgaaaccccgtctctactaaaaatacaaaaattagccaggggtggtggctcatgcctgtaatcccacctactcaggaggaggcaggagaattccttgaacctgggaggcgggggttggagtgagccgagattgtgccactgcatttcagcctgagggacagagtgagactctgtcagaagagaaaggaaggaaagggaaggggaggggaggggaggggagggaagaagagatcttggcataacccaaacccccttcagaagggtcaccctggctgctactttaaggataggcagacagagggagttgtgggagggaaggccagtcaggtggagagacttcctgggcaaacttctggaggttgaaagagtgtgatgtgggctctgacctgggagaacagtcatggagccaaggatagtgggggcgggggatgctggggtcctggggaatggcgtggggagtggccagagacttgaggacttttgtcttgttcctgagcagagtcttccattcctccggcattgagacttttttttttcttttttttttttttttttgagacagggtctcactctgttgcccaggctggagtgcagtggcgtgatctcggcttactgcagcctccgcctccagggttcaagtgattctcccgcctcaacctccctagtagataggattacaggcatgcaccaccatgccagttaatttttgtatttttagtagagacagggtttcactatgggtgaacttgctggtctcaaactcctggcctcaggtgatctgcctgccttggcctcccaaagtgctgggattacaggcatgagccaccacacccagccaggctctttttatagacaaagatgttagcgttctcgccctctcatctcacagggcatgaggtctctctccagcctcttgtgtgaaggcacaggtcccattcacgaggtctccaccctcctcatctcccataggccccaattcttaacaccacgacctggggggttaagatttcaacatatattggccaggcatggtggtgcacacctgtaatcccagcactttaggaggccaaagtgagcagattgctttgagctcaggagtttaagaccagcctgggcaacataccaaaaaccccatccctactaaaaatgcaaaaatcagccaggtatggtggtgggcgcctgtaatcccagctactccggaggctgaagctggagaatcactggaactcaggaggtggagtttgcagtgagccgagattgcgccactgcactccagcctgagcaacagggtgatgagactccatctcaaaaaaaaaaaaaaaaaaagataaaaaagatttcaacatataaatttggggggacacaaacattcacaccaaagcacttggcttgccaagtcatctccccaccccagccccatccgtttactccctacagttggttgaatgacagtcctccaaaaatgtacattcatatcctaacccccagagcctgtacgtgtgatcttatttggacaaagggtctttgaagttgtatttatgtgaagaatcctgacatgagatcatcctgaattagaatgggctctaaatctattaataagtgtcctggccgggtgcggtggctcacgcctgtaatcccagcactttgggaggctgaggcaggtggatcaccgaaggtcaggagtttaagaccagcctgaccaacgtggtgaaaccccgtctctactaaaaatacaaaaattagccaggtgtggtggcgggcgtccgtagtcccaactacctgaaagactgaggtgggaagatcagatcacttgagttggggaggcagaggctgcagtgagccaagatcatgccactgcattccagcatgggtcacagagccagagggaaaaaaaaaagaaagaaagaaaaaatgtcatcagaaaagaatggagaggccaccgtgactcacacctgtaatcccagagccttgggaggctgagttgggaggatcacttgagcccaggagtttgagatcagcctgagcaacatagtgagacccctgtctttagaaaaaagtttttaaaaattagtggggcttggtggtgtgtgcctgtagtcccagctactcaggaggctgaggtgggaggatcccttgagcctaggaggtcgaggctgcagtgagccatgattgtaccgcttcagtctaggctgggtgacagagcgagattccgtctcaaaaaaatttaaaaaaaaaggaaacgaaaaagaaaaaaagggaaccagacacagagacacagggaaaaagtccatgtgacaatggtggcagaaactggagtgatgcagccacaagccaaggaatgctgggagccaccagaggcttgaagaggcagaaaggatcctcccctagagcctccagagggccaccttgacttggggctaatgatactgatttgggacttaagggatccagaactgtaagaaaataaatgtgttttttttgtttttgttttgaaattatattttattgatatataatagtcgtattgttttgttttctgctgtcctgaagccacctagtttgtgggcattggttacaacagtcacaggaaatattatagttggccctccatagccacgggttccttatccaggattcaacaaactgtgaatggaaaacattagggaaaaaaaccctaatcctagcactttgggagggtgaggcaggcagatcacttgaggtcaggagtttgagaccagcctggccaacatggtgaaaccctgtctctactaaagatagaaaaaaattagctgggcgtggtggcagacacctgtagtcccagctacttaggaggctgaggcaggagagtcgcttgaacctgggaggtggaggttgcagtgagccaagatcatgccattgcactccagcctgggcaacagagtgagatcctgtctaaaaaaaacaaaaagaaaaacaaaaaacaacaacaaaaaccctggctagccatgctggctcatgtctatagtcccaagaatttgggaggctgaggtgggcgggttgttggagcccaggagttggagagcagcctgggcaaagtagcaagacccccatctctacaaaaaacattaacaaaataagtccagtgggtggcgcacacctgtggtcccagctactcgagaggccaaggcaggagaattgcttcagcctgggaggttgaggttgcactgagtgatgattgcaccactgcaatccagcctgggtgataaagcaagactctatccaaacaaacaaacaaacaaacaaacaaaacaaaccatattttatctatttatcatttttattattttaaattattattattatttatttatttagttttgagacagagtctcactctgtcgcccaggctggagtgcagtggtgcgatcttggctcactgcaagctccgcctcccaggttcacgccattctcctgcctcagcctcctgagtagctgggactacaggcacccgccaccacgcctggctaattttttgtattattattattattttctttttttttttagatggagtctcgctctgtcacccaggctggagtgcaatggcacaatctcagctcactgcaacctccacctcccggattcaagtgattctcctgcctcagcctcccgagtagctgggactacaggcatgtgccaccatgcccggctatttatttatttatttatttatttgtatttttagtagagacggggtttcaccatgttagccagaatggtcttgatctcctgacctcttgatctcctgacctcgtgatccgctgcctcggcctcccaatgtgttgggattacaggcgtgagccaccgtgcccggcctatgtttaattattttattattttaacaattatctttatggttaaaaatatcacaacagtaaaaaaaaatacattctctgcagcccggattcagaaaatgataaaaattaaaaaataaaaatgagggaggcggatcacttgtggccaggagttcaagactagcttggccaacatggtgaaaccccgtctctactaaaaatacaaaaaaattagccagtcatggtggcacgtgcctgtaatcttcgctactcgggaggctgaggcctgagaatcacttgaagccgggaggtggaggttgcagtgagccaagatcgcgccactgcactctagccacacatatgtatacatatacatatatgtgtatatatacatacatgtatacagcatatatacacatgtatgtatatatacagcaggatgtgcataggtgatatgcaaatactatgctgttttataaaagaaacttgagcatctgtggattttggtatccagggaggtcctggaaccaatcctacaggatgcaaagagaggactagaatacattccctttcctagcaaaacatcccaagagttatcactgggtccggctgctcttctctcgtcctctctctgatcctctcctttcagtattttgttcccactcggccactagaagggctccatcctgcccaacctgatggtcgtttctcagcctctaggactgtgcactcccagcttcccctcccacctccaaggccaccacttcttagtctcttctgtgattcctcttcatctcccaatcttagccttgaagagaaagccaagagccaagatcggatcattgctcaccagcctgggcgacagagcgagactctgtctcaagaaaaaaatgattaaaataaaataaaataggctgggcacagtggctcacgcatgtaatcccagaactttggaaggtccaggcgggcagatcacgaggtcaggagttcgagaccagcctggccaagatggtgaaaccccgtctctactaaaaatacaaaaaatttgccaggtgtggtggcgggcacctgtagtcccagctactcgggaggctgaggcaggagaatggcgtgaacccggaaggcaaagcttgcagtgaggcaagattgcaccactgccctcctgcctgggcaacagagcgagactctgtctaaaaagaaaaaaaaaagaaaacaattaataaataaaaataaaataaatgctgggctgagcgtggtggctcactgtaatcccagcagtttgggaggccgaggttaggagtttgagaccagcctggccaacatggtgaaaccccatctctactaaaaacacaaaaggtagtcgggcatagtggcaggcacctgtaatcccagctactcaggaggctgaggcaggagaatcacttgaaaccggaaggtggaggttgcagtgagctgagatctcgccactgcactccagcctgggcaacaagagtgaaactccatctcaaaaataaataaataaataaataaataaataaataaataaataaataaatgccacttacacccgacagctcccagtggcgtcccccacctctcacctctctgctgaccttcacctgccccccagatgtctctgctggaaacccagtgggcacacccaagtatcacaccggaagcagactcttcatcacactccagacctgtttcctcctctgtcctccccgctcctctgtcctccctgctcctctgtcctccccgctcctctgtcctcccctcctctgtcctccccgcccctctgtcctcccccctcctctgtcctcccccctcctctgtcctccgcctcctctgtcctcccccctcctctgtcctcccccctcctgtgtcctccccaaatcagttaatgacacatcatcgtcctctattggtgcaggagctggaatagtgtcttcctcccctgacaaaattcatgtttacctggagcctcagaatgtgaccatatttggaaatagcatctttgcagatgtcattagttaagttaaaataagatcttactagcccagcactgtggcttgagcctgtattcccagctatgcaagacgctgaggtgggaggatcacttgaggccaggggtttgacaccagcctgggcaacataatgaaaccttgtctctacaaaaataaaaattttttttttttttgagactgagtctcgctctgtcacccaggctggagtccagtggcacgatctcggctcactgcaagctccatcttccaggttcacgccattctcctgcctcagcctcctaagtagctgggactacaggcgcccgccaccacgcctggctaatgtttttttttgttgttgttgtttttgtatttttagtagagatggggtttcaccatgttaaccaggacggtctcaatctcctgacctcgtgatccgcccgccttgacctcccaaagtgctgggattacaggtgtgagccaccacacctgggctttttgttttgttttgttttttgagacagagtctcactctgcagcccgggctagagtgcagtggcacgatctctcctcattgcaacctccgcctcttgggttcaagtgattctcttgcctcagcctcccaagtacatgggattataggcatgcaccaccacgcccagctaattttgtatttttagtagagatgaagtttcaccatgttggccaagctggtctctaactcctcagctcaaatgatccactctcctcagcctcccaaaatgctgggattacagttgtgagccaccacacccagccaaaaattttaaaaaattagccaggcatgtggcacacacttgtagtcccagctacttaggaggccaagatgggaggattgcttgagcccaaaaattggaggctgcagtgagccatgattgtgccactgcactccagcctgagtgacagagtaagaccctgtctcttaaaaaaaaaaaaaaaaagatgaagtcttactggactagaatgagccctaaatccaatgacaagtgtccatctaagaagaggagaggacacagagacacacagagaccatggaagcctctccatggaatgactggaatgatgcagctttgagttgaggaacaccaaggattacaaggagctaccaaaatctaggagagagacaaggaaggattcttccctagaaccttcaaagggagcccagccctgccaacaccttgactttggactttgagcctgcagaactgtaagagaataacaaacttatgttgcttcaaaccaccaagtttgtggtaatttattgcagcagcactagaaaactaatacagttgggtgcttcagaagtgtacctgagacactctgatttgagtaaaagtggtttatctgtaaggtgattgcagggagtgctggcaggggatggaggagatgagatgcagaagggagggcagccagtacatcatgtggaaatgagcaggttattctgcgatatctaggtcttaactcatcttggacaaaccctgagagttatcttatgcaaagggtgagggagctggggtatttatcctccaactcccagccattgttagttgaggtatgctagcagggaaaatgaattctccagaacttctggctgcctgcatgcaccagagcaaagctgtcaggcaaagagtcacaggtacaggtggtatgaagccactggattgacgtgcatggtgtagggacagcctctaagatggccctcaatgttccaacccttgcattaatgccctacccttgagtgtggttagactctatgacttgcttcctgcccatagaatgtggcaaaatcgatgcaatgtcacttctaaaattaggtcacaaaaaagaccacgcctttcatcttgggtgcactcccttttttttttttttttggagatggagtcttgctctgtcgtccaggctggagtgcaatggtgcaatctctgctcactgcaacctccacctcccggttcaagtgattctcctgcctcagcctcccaagtagctgggattacaggcatgggccattatgcccagctaattttttatttttactagagatggggtttcaccatgttggtcaggctggttttggactccagacctcacccacccacctcagcctcccaaagtgctgggattacaggcgtgaaccattgtgcccagctggatgcactccctttcttgccctctcttctgctcactctgagggaagccaactgccaggctgtgagctgcccatcggagagggtcacaaggccaggaaccagaagaggcctctgaccaacagccagtgggcaactgatcctgccaacaactcatgagcttgaaagtggatcctccccagtcgagctttcagatgagatcatggcctcagtcaccaactatttctttttaattgagatgcatccatgcccatttgctttttgttgttgttagttaattaattaattaaaaaatagagatagggtctcactctgctgtccaggctggagtgcagtggtgcgatcaatagctccctgcagtattgaactcctgggctcaagggatccttctacctcagtttcccaagtagctgggactataggtgcatgccaccacacctggctaattttttgtttagtttagtttagttttgttttgagatggagtctcactctgtcacctaggctggagtgcagtggtgcaatctcggctcactacaacctccgcctcctgagttcaagtgattctcctattcagcctcctgagtagctgaaactacaggcccatgccaccatgcccggctagattttgtatttttaatagagatggggtttcaccatgttggccaggctggtctcaaacttctggcctcaagtgatccacctacttcagcctcccaaagtgctgggattatagaggtgagtcactgcactggcctaaaatttatttaattgacaaattaaaattgtacgtatttatggtgtatgacatgatgttttgaagtacatatacatttcagaatggctaaatggagtgaattaacatatatattacctcacatgcctatttttgtgtgtgacaagaacacttaaaatctctctcagtgattttcaagtatacgatacattgttattagctatagtcaccatactgtagaagacatctcttgactgtattcctgtctaactgaaagtgtatagcctttgactaacatctccccagtccctccactctagcccctggtaaccaccattcactctctgttctttttctttcttttttggaaacagggactcactttgtcatccaggctggagtgcagtggcatgatcatggctcactgcagcctcaacctactggggtcaggtgttcctcccacctcagcctcccaagtagctgggactacaggcacacaccaccatgcccatctaattttagtattttttgtagagatcaggtttcaccatgttgcccaggcctgtctacaactattgagctcaagcgatccacctcccttggccccccaaagtgctaggattatagggatgaaccaccacgtgcaatctcggctcattgcaacttctgcctcccaggttcaagcgattatcctgcctcagcctcctgagtagctgggattacaggtgcgcaccaccatgcccggctcatttttgtatttttagtagagacggggtttaaccatgttggtcaggctggtcctgaactcctgacctcatgatccggccgccttggcctcccaaagtgctgagattacaggcgtgagcgactgcacccggatagtaacccatctgtaccccatcactgtagactcccctctttctgtcatccctcacatccaatccattagccagccctgtccactccaactccaaaacccaccctgagcccatagagccttcctcacctgcactgccaccagcctgggacaagtcattcttgtctgtcatctgaattgtagcaaagatctctcctccctatcaagctctatccaggtggatctgctcagccaaggtaggctttttaattctttattttagagacagcgtgtcattttgttgcccagaagggagtgaagtggtgcaatcatagcttactgcagcctcaacctcctgggcttaaatgagtctcctgccttagcctccacagcagctggaactacaggtgcgtgccactgtgctcagctaattttttttttttttgaaatggagtctcactcactctgtcgcccaggcagtgtgtcgcccaggcagtgagtacagtggtgtgatcttgcctcactgttacctccatctcccgggttcaagtgattctcctgcttagcctcccaagtagctgggattacaggtatgcaccaccccacatggctaatttttgtatttttagtagagatggggttttgccacgttggccaggctggtctcgaactcctggcctcaagtgatctgcctgcctcagcttcccaaagtgttgggattacaggtgtcagcaactgtgcctggcctaattttaaattttttgtaaagatgtggtctcgaacccctagcctcaagcgatcctcccacctccacctcctaaagtgctgggattacaggcgtgagccactgcatccggcctcctgcacttcttccttaagcacatgctcacccagtgcttccattcatgcatgggaccagcactcattaagcacttactgtatgtacctgacctctgagtatccaacaggcatttttctcatttaatccttgaaatgaccctactgtcattgtacctatattatagccagagaaacagaggcacagaccagcaaaaccacttacctaaggtgactcagtcaatgccaggcagggctgggatttgtaggttttttttgttgtttgagacggagtcttgccctgtcacccaggctggagtgcagtggtgctatctcagctcactgcaacctccacctcccgggttcaagcgattctcgtgccccagcctctcaagtagctgggattacaggtgtgcaccaccatgcctggctgattttttgtttgtttgttttcttttgttttgagtcagagtttcactcttgttgcccaggctggagtgcagtggcgcgatctcggctcactgcaacctccgcctcccaggttcctgtgattctcctgcctcagcctcccgagtagctgggattacaggcatgcgccaacatgcccagctaattttttatatttttagtagagacagggtttctccatgttggtcagcctggtctcgaactcccaacctcaggagatctgcccgccttggctcccaaaatgctgagattacaggcatgaaccaccacgcctggctttttttctttttttttttttttgagatggagttttgctctgtcaccaggctggagtgcagtggcgcgatcttggcccactgcaacctccgcctcctgggttcaagcaattctcctgcctcagcttcccaagtagctgggactataggcgcatgccaccacacccgactaattttttgtattttagtagagacgggggtttcaccatgttggccaggatggtctcaatctcgtgaccttgtgatctgcccacctcggcctcccaaatgatttttgtatttttagtagaaacggggtttcaccatgttggccaggctggtcttgaactcctgaccccaagtgacttgcccgcttcagtctcctaaagtcctgggattacaggcatgagctactgctgaccccagggctgggatttgaacccacgcagtttctataccagccctggggtcttcattgacattcagcttatgcatccaatgtgttaattctctcacttccaaacagatgggcgtttccaagtgcccagagaccctggcaggtttacatctcttggctttatccagaaggtggtttggtcttcaaggccgggcacggtggcgcacacctgtaatcctagcactttgggaggccaggcaggcggatcaccagaggtcaggagtttcagaccagcctgaccaccatggagaaaccctgtttctactaaaaatacaaaattagccgggcgtggtggcacatgcctgtaatcccagctactcaggaggctgaggcaggagaatcgcttgaacccaggaggcagaggttgtggtgaatcaagatcgcgccattgtactccggcctgggaaacaagagcaaaactccgtctcaaaaaaaaaaaaagaaaagaagagaacagaaggtggtttggtctttctcagctgcgctgatgaacaggcccatttcttgtcctcagagatagggtctagcgtagcaggggagtcaaggcaggtatcactcaactgaaatccacaggaactactcaaccctgtgtaagagcacctgggatgtgttaactctgcctgggagagatttggaaaggcaggaaggactctttttgttcgtctttgttggtttttgtttttttttttttggattgttgtttgttttgagacagagtcttgctctgtcgtacaggctggagtgcagtggtgagatgttggttcactgcaacctctgcctttccggcaattctcctgcctcagcctcctgagtatatgagattacaagtgcctgtcaccatgcctggctaatttttgtatttttagtagagacggggtttcaccatgttggccaggctggtcttgaactcctgacctcaagtgatccgcctgccttggccccccaaagtgctaagattataggcgtaagccaccacagctggcccatctttgtattctgagccagctaaacacacaaaggccagactggggcagggcatggtggctcatgcctgtaatcccaccatttcagcaggccaaagtgggaggattgcttgaggattgcttcaagaccagcttgggcaacatagcgagacccaatctcttaaaaaataacaaaaaattagctggatgtggtggcacacacctgtagtctcagctactccagaggctgaggcaggaggattccttgagcctgggagattgttagcctgggtgacggaatgaggccttgtctcttaaaaaaaaaaaaaaaaaaaggccgggcgcagtggctcatgcctgtaatcccagcactttgggaggccaaggtgggtggatcaccaggtcaggagatcgagaccatcctggccaacatggtgaaaccccgtctctactacaaataaaaaattagctgggtgtggtgttgtgtgcctgtaatcccagctactcgggaggctgaggcaggagaatcgcttgaaccaggtagtcggaggttgcagtgagccgagatcgcgccactgcacttcagcctggtgacagagcgagacatcatctaaaaaaaaaaaaaaaaaaatgccaaagtgggtaaatgacttgccgcaggtcacacagcctggaagtccgaaggagcctttgcaagaaatcttgctgctttcaaccctccttgttagtctcccaggctgctgtaaggaagtgctacccattgggtggcttaaagcaacagagatttattctcttccacacctggaggccagaagcctggaatcaaggtgttgacaggaccatgttccctctgaaacttgcaagggagactccttccttgcccctgcctggccagcgggcattggtggtggccagcaatgctgggtgctccttggcttgtagatgatgcatctctccaatctctgcatcatccagtctctgcctcctccatcacatggactctccctcgtgtacttgtgtctattctcttcttaccaagacactggtcgtattggctgggcgcagtggctcacgcccgtaatcccagcactttgggaggctgaggcgggcggatcacttgaggtcaggagttcgagacctgaggcaagttgcaatttttagccccattttatagatgaagccactgagtcttggataataacatgctcattcttcctggaaccacccagaagacttctgctggagtcttattggccggaagagtgtcacacagccatctctagaaggaagggagttgggaggctgaggtaggcggatcacttgaggtcaggagtttgagatcagcctggccaacatgacgaaaccccgtctctactaaaaatacaaaaaattagccgggcatggtggtgggtgcctgtaatcccagctactcgggaggctgaggtaggagagtagcttgaacctgggaggcggaggttgcagtgagctgagattgcaccactgtcctccagcctgggtaacagagtgagactctgtccccaaaaataaataaataaataaataaataaataaaatagaagcaagcgggacttgaaggctggaataatggcaaggggagctggaagaggggctggaagacaaaaaaaatacataaacacataaataaataaaatagaagcaaggggggctggagggcaaggattaggcagggcacactgacacttaaggagccctgtgttagcaaaggaaagagataggtgtgaatttgacaaactgtgtctcccacaattctccctgcctctgaatctggatgaagtatattgagtgcccgctaaggactaagcactatgctacagactcacggcaaattattccttttttttttttgagatgaagttttgctcttgttgcccaggatggagtgcaatggcacgatctcggttcactacaacctctgcctcccaggttcaagcaattctcctgtctcagcctcatgagtagctgggattacaggtgcacaccaccatgcccggctaatttttgtatttttagtagaggtggagtttcaccatgttgaccagactggtcttgaactcttgacctcaggagatctgcccacctcggcctcccaaagtgttgggattacaggcgtgagccactgcacccagccttcaaggcaaattcttttttttttccccctgagatggagtttcactctgtcatccaggctggagtccagtggtgtgatctcagctcactgcaacctctgcctcctgggttcaagcgattttcctgccttagcctcccgagtagctgggattacaggtacacgccaccacgcccagctaagtttttgtatttttagtagagacagggtttcaccatgttggccaggcggtctcaaactcctgacctcagtgatctgcccaccttggcctcccaaagtgttgggattacaggcatgagccactacgcccggccaagacctcaactcttaaataaataaataaataaagccaataccatccctgcagagttagctttcaggagggcttatattctagttgctgagggatggggtggctcagaaataatattggttatgggaataacttgtactgtggtccaggcactgctttgaggacttctcattcactaagtcaattattcattacccgctatataaggtgggttttttgtttttgtggattcttttttttttttttttttttgagatggagtctcgctctgttgcccaggctggagtgcagtggcgcgatctcggctcactgcaagctccgcctcctgggttcatgccattctcctgcctcagcctcccgagtagctgggactacaggcgcccgccaccatgcccggctaattttttgtatttttagtagagatggggtttccccttgttagccaggatggtctcgatctcctgacctcgtgatccgcctgcctcagcctcccaaagtgctgggattacaggcgtgagccaccacaccccgccttgcagatttttttttagagactacaggtgtaagccattgtgcctggcttttttttttttttttttttttttttttggtagagacagggtcttgctatgttgcccaggctggtctcaaactcttggcctaaagggaccctcctaccttgggctcctgagtggctgggattacagactccggacactgcacccggctccaggtgggttttattaccatcctcattttataaatgaggaaaggggctcggagaagttaagtaacatgcccaatgtcacacagctaataactgtgaagccgggatttgaacccaggttcttggattcgagagcataagaccctgagttcaggtaagtaatacaatgtcagctggctgtaagacagatgatggtaaataacagggaccactaggcctggcaaggtggctcacacttgtaatcccagcactttgggaggcagaggtaggcggatcacctgaggtcaggagtttgagactagcctggccaacatggtgaaaccctgtctgtattaaaaatacaaaaattagccaggtgtggtggcatgtgcctgtggtcccagctacttgtgaggctgaggtgggagaatcgcttgaacccaagaggcggaggttgcagtgagatcacaccactgtgctctagcctgggtgacagagcgagactccatctcaaaaaaaaaaaaggccaggggcggtggctcacgcctgtaatcccagcactttgggaggccgaggcgggcggatcacgaggttaggagatcgagaccatcctggctaacacagtgaaacccagtcaatactaaaaatacaaaaaattagccgggcatggtggcgggcgcctgtagtctcagctactcgggaggtcgaggcaggagaatgccgtgaacccgggaggcggagcttgcagtgagccgagatcaggccaccgcacttcagcctgggcgacagagcaagactccgtctcaaaaaaaaaaggccggcgcggtggctcatgcctgtaatcccagcgctttggaagaccgaggcaggtggatcacctgaggtcaggagttctagaccagcctggccaacatggtgaaatccggtatctactaaaaatacaaaaattagctgggcatggtggcatgcgccggtaatcccagctactcaggaagctgcttgaacccaggaggtggaggttgcagtgagccgagattgcaccactgcactccaacctgggctacagagcaagactccgcctcaaaagaaaaaatacaaatacaaataaaataaagagaacagccagtgggaagtcccagaaatgggcacacactgggtgtgtctggggtgcagtgaggggccccctgtggctgaggcgaaagtctagggattattgcacccactttgcacgtgtgaccttccacaattcttcacacagcgactccttcacaacagtctcatgacataggtttttataattctcctctcttgacgggcggggaaactgaggctcagggtggctaattgagccacagccagaaagcaatggagctccaatctgaatccaggcagcctgcccccactgccgaactccaagggaaacacagtagggagccaatgccagcaggctgggagggctgcctggaggaggtggatgtcaccaggacctgcgggaggaccctgaggagcagggagggagggagctgccgctgaccaaggcacaaaaacatgttcctggggcagttcttggaaggcagatttccaggtgcctgcccccaatgtggccctgcctcccgctccccctggccccctcttcctagagggaaggcggcaagaggcgcttcattagcgcctctgaggccccagcagccccggggggatgaaaagggcctaggaggggagccgtcctaattttggcacacctggcagggggcccagggccactgaaagggattcagctggggccggctgggcaggccccgtcattgttccggctagatccgcggtcagggcttcaaatgcaaaatcgggctggggatggggtgggggcgccggtggcctctgctcttcctttaatagaccaaaggactctggcggcttagctctttttcctaatttaaaggtattttcaggcgtttgggagctcccctacggcgaagcaggaaggctgggaagtggggggccttgaaactctcttcgtggttgcccgcggaggatggaggaaaaggcggggaggaggggggctgaggttggtctggggtcactggtggggcgctgggcaggtggagacccgtgttgagttctcggctgtcctctgccccagtttccctctctggaacctctgtctggtttctggaaccgtccccagcaggtaggacggatgcaggtgtgcccaaacggcagtttcttcctaaggagctctttcgggtcaactccggaggccttgactagggaggcagatggaggaggcttgatccctctcagcatggcagccgtggtgccaaggcaggaaggagggtagggaggcaagccaatggggtgcagcggcctccatgccagaaaatgggggctccctggatcatctcctcggcgggagggtgcacggggaccaggagagagaaccaaaggaccccgctggaggggggcttggagcctagagacagttgagggggtactgtcttcccctctctcctggccacgctgcccggtcggcctttttctcccctttccctccccttttgcccccacccccgcctgcccccctccaggccccagcgccccccactcccaaccccccggcctgctctcctgcctcccccgtgccacctccttgggctgcgtttctcttccctcctccgagttccaggccatcccctctccccctccccagcccgccctcctccttctgactggctcccgcctccctaacgctctctcagcctcccagccccctcctccctccctctctctctccctctctccctttccttccttcatcccagcctctcttcccaccttccccagcaggagagagggggccgcgctccccccagcccctccccctctctccctggggccgccgccatcttgcaggatgctggggagggagccgcgtgcaggccatggaaacaatgcatcttttatgaagcgatccccgctcctcgcctggaaaccttgcattaatgcggcattgatttccctcgtaatagagggggctctcccgcgcccccaacccgaggggcgcaagaagggagggggccagtttcgggggcgaggagggaaaagtggagggtgatggagtcatcgctccgggctcccagctctgcagccggcgccctccccgcgccccgcctggagacccccaccccaccccgcaggtggaggttcccagagtgggggaggggttccggcgcgaggccctctagtaacttctgggctgagacccagccacagagtcccggccgatgggatccccacccccctattctcagccctggcattggccagaaagggcgcaggagaccctcggctgcccctggggcccgctgtctgcggccaggtcctctgggacacgtgtccccccctccccccagaaccctccgaggttccccagctcctccaagccctgtttccttcccctcttccatcttgccgcctcactcccatccttacagctcctgccttcctcgtcctctcctggctccccccttccccttccctgctgcctgccccctccctccacacccccttccctgcgtgctaatggcccggtggcaggcggctccgtggctgtttccgggggaggcgggtttgcagccaggggagatgttggagcggtttgaggaagaagaattatacatacataaatctgggataatgacggtgttgctaatggggcgggcggcggcagctcccggcagtgcccccccacaaacacacaccccatcacacacactcagggaccagcctggcttcctgacgcgtttgagggtccgtgggccccgatcatctccttgactggccctgaaacatccctgctgcagatacggggtccatgctcatttgtgacatcaatgaaacatccccctccagccccccaattcaatttgcggcttgccactttgcttgccctgtggcctaggggtgagtagttaccccagcaggacaggtgtgttcacttgggtcttattaccccaccaccagcctggaccccccactcctctaggttttctgaggtcacaccacccaccacatgacatcttttgcataactgaaggaaggtcagacggattttcttaccctttctccatttcatagctgtgtgaccttaggcaaattacttaacctctctgagattcagttctctctacttgtaatttgggaataattatgttcaaagaacctgaggctgaggtgggaggatcacttgaggcaaggagttggagaccagcctgggcaacatagcgaaacccctgtctcaaattaaaaaaaaaatttttttgaaaaaattagtcaagggccaggcacagtggctcacacctgtaatcccagcactttgggaggccaaggcaggtggatcacttgaggtcaggagttcaagaccagcctggccaacatggcgaaaccctgtctctactaaaaaaaaaaaaagtacaaaaattagccggtgtggtggtgcatgcctgtcatcccagctactcgggaggctgaggcacgagaatcccttgaaccgggaggcggaggttgcagtgagcggaggtcgcaccactgcactccagcctgggcaacagagcaagaccctgtccctaaaaaaaaaaaaaaaagagaacgtgaattcacccacttctttccacttttgtgcttcccaactccttcatcacttgcctggatttactgaggttgccttggccacaggctcctggcttctgccctggcctccatccgtccttaccacagcccagaggtatctttgaaaagacaaggaagttcacgttttccttctattgagaacgctgcaatgcaccgccatggctcttagattaagaccgaaatccctcactcaacctccttgggattcctctctccatcgctaagtccactccagctacactgagcctttgcactggttgttcccacttcctgcaacacccttccccctagatctcacatggccaaccagctctgccttcttcttcacgcctcagctccatgtcaccacccctagtcaatctccattaactctctgatatcgcttacttatttgttttcatgaccattccctcctggaataacatctctctctctctctctcttttccttccttcctttttccctccctccttccttcctttcttgcttccttccttttttgttttttttgacagagtctcgctctgaacacccaggctggagtgcaaaggcacgatcttggctcattgcaacctctgcgattctcctgcctcagcctccccagtaggtgggattacaggcatggctgtacactcagctaaattttgtgattttagtagagacagggtttcaccatgttggccagggtggtcttgaactcctgacctcaggtgatccgcccgcctcagcctctcaaagtgctgggattacaggcatgagccactgagccaagctgtttctttcttttttgagatggtgtctcactctatcacccaggctggggtgcagcagcgtgatctcggctcactgtaacctccaccgtgttcaagtgattctcctgcctcagcctcccaagtagctgggacaataggcaggtgccaccattcccggctaatctttgtatttttaatagagacaggttttcaccatgttggccaggctggtcttgaactcctgacctcaagtgatctgtttgtctcggcctcaagtgatctgttcatctcggcctcccaaagtgctgggattacaggtgtgagccaccgcacctggccaaaatttataaaccttgactcttattctcggtgtgtcccacaatacctggcacctactagattttcaaatatgtgttgactgagtgaattaaataaataacgttgtgactatgtaaggatataagtgatgtaaagttcttggcaggtcaccagcattcaataaaccaagatgctgggcacagtggctcacgcctgtaaccccagcatgttgggaggccaaggcaggaggatagtttgaaccaggggttcaagagcagcctggacaacaaagcgagaccctgtctctacaaaaattacaaaaaaattagctgggtgtgatagtgtatacctgtggtcccagctattcgagaggctgaggtgggaggatcacttgagcctgggcggttgaggctgcagtgagccaggttcctgcgatccagcctgagttactgagtgagaccctgtccacatccccacaagaggtaaacttatgttcatcaaaagacatgtacaaggatgttcatagctgctttatctacaataaccattcactgcaaacaactcaaatatctatcagcagtaagataaatacattgtgatacatctccacaatggattattatacaaccaagaaaaagaacaggaaagcagacatgacaatagattctcacagatacaatgttgcgtaaaagcaagacgacaaaccatgtatttccacttacacaaagttcaggggtaggcaaaactaatctatgatgaaaatgtcaaattggaggatactgactgagaaagagcatttgggaatttcctggagggacaattatgttcttctggtctgcatggtggatacacaggtatacacgtgtagaaattcaccacgctgaaatttatgatttgtgcactttaccatattcattaaaaaaaaaaaaaaaaaaaggaagccagtcatgatggcttgtgcctgtaatccaagctactcaggaggctgagatgagaggatcgcttgaggccaggagctcgagaccagctgggtaatgtagtgagaccctgtcttcatttaaaaaaaaaaaaaaaaaaaagattaggctgggtgcagtggctgtaatcccagcactttgggaggccaaggtgagcagatcacttgaggtcatgagttcgagacttgccttgccaacatggtgaagccctgtctctactaaaaatataaaaattagccaggttaggccagggatagtggcttacgcctgtaatcccagcattttggaggccgaggtgggcggattataaggtcaggagtttgagaccagccaatatggtgaaactccgtctctactaaaaatacaaaaattagtcaggtgtggtggtaggcgcctgcctgtagtcccagctactcgggaggctgaggcagaagaattgcttgaacccgggaagcagagattgccgtaagctgagatcgcgccattgcactccagcctgggcgacagaggaagactccgtctcaaaaagaaaaaaaagttagccaggcattgtggaggttacctgtaatcgcagctcctcaggaggctgaggcaggagaatcacttgaacctgggaggtggaggttgcagtgagccaaggtcacaccactccactacagcctgggtgacagagcgagactccatctcaaaataataatcataataataatgaaaagaaatgatgctggatgcagtggctcatgcctataatcccaacactttgggaggccaaagcaagaggatcacttgaagccaggagtttgagaccagcctgggcaatgtagcaggaccctatctctacaaaaacatatatattttaaaaattagccaggtgtggtggtgcatgtctgtagtcccagctactcgcatggctgaggcaggaggatcacctcagtccagtaatttgaggctgcagtaaggtgtgatcacaccactggactccagcctgggcaatagagcaagaccctatctcaaaataaaagaataaaatatacaataaaaataaaacagagcaaagagaatgtcccctagagccatgtgtgatccatacgctttgtgaatcctgacacctcctctccttcgaggttgtacaactgtcttccaaagttggaaaaaaaaaatgtttaaagctgcccagattcaggagggaggtccaaggggtaccagtgccctcccccatttcccaaggacgacaagggttgccagcctcccttggccttggggtgtgcgcagctcggcgtgagggccagtggttgatcttgaagtttctttcctactccctcatccctttcctgcccaagctgtggtcccagctgactcccctatcagcgactgcgagtgagttcggttgttatggcaacggggctgcggagatccccgggaacctgctggtccgcctcattgcctcaccgtatggggagctgcttttcccccttaaaaatgaaacgggagtgggatgggggaggaacccccttcttctgctctggaatgaaatgcctccctcacctgctttgtcccaaacccccggtttggagaggagggtctggatgggacccagactgtggataaggatggagggaggagaactcctgctccctgggttttagcagccttcccaggtcccaccgaacacgaggaacacggtctttctccagctccaacttttctcatctgtccattcattttttccacaggaggcatgaggaggtgagagatggaaagaatgctgcctgtcatttggagtcagaaggaaaagaaggttgagggtctggcagctttgctctagtggttttttcctgtttcaccttttacaaaatcgagataattgtttctacttggtagcgatattgtgaggtgtaaaatggattaacacatgcaaaatgcttaaagcaacttctggcatatggcatatggtgatctctcaaccaatcgattgttattttattattatttttttgagacggagttttgctcttgttacccaggctggagtgcaatggtgtgatctcggctcactgcaacctctgtttcccggattcaagcgattttcctccttctccaggtgtccaccaccacgcccagctaattttttgttgttttttgttttgttttgttttgtttgtttgagacagagtctcgctctgttgcccaggttggagtgcagtggcgcgatctcggctcactgcaagctctgtctcccaggttcatgccattctcctggctcagcctccccagtagctgggactacaggcgcccgccatcacgcctggctaatttttgtatttttagtagagatggggtttcaccgtgttagccaggatggtctccatctcctgacctcgtgatccgcccacctcggcctcccaaagtgctgggattacaggcgtgagccaccacgcctggacaattttttgtatttttagtagagacggggtttcaccatgtcagccaggctggtctcaaactcctgacctcaggtgatccacccgcctcagcctcccaaagtgctggaattacaggcgtgaaccaccgtgcccagcagggagaccctgtttctacaagaaaaaatttactgtgatcccagcactttggaaggccaaggtgggaggatcacttgagcctaggagttcaagtccagcctgggcaacatacatagggagaacccatctcttaaaaaaagaaaagaagaagaaagaagaaagaagaagaagaagaagaagaagaagaaagaaaaagaaataattacatgtaaccctaccagcagttttgtgggattgctatgatcatacccatttcacagattaggtaactgaggttttagtgccctggagatgaaggcattctctagtctcccagaagccctggactcttgaacaaccccaaatgctaaactcagcagtaaaatggctggtggctcctacctgagggttcacagaggggctgcctgtgcttgtctcccagccctttcttcctgtgtattaagagggttgcagctacttcagggccagcgtctccacaagtcatcatgacggcttcctgatcatggctctctctctctcttttttttttttaagacgaagtctcgctctgtcgcccaggctggagtgcagtggcatgatctcggctcactgcaagctccgcctcctgggttcacgccattctcctgcctcagcctcctgagtagccaggattataggcctgcgccactgtggccagctagtttttttgtatttttagtaaagatggggtttcactgtgttggtcagggtggtctcgaactcctgacctcaaatgatccacctgccttggcctcccaaagtgttgggattacaggtgtgagccactgcgcctggcctggagatctgtttgtcatattggtgaacacttttaaacaaccagatcttgtgagaactcactcactatcacaagcacagcaagggaggcctctgaccccatgatccaatcacctcccaccaggcccttcctccaacaccagggattacaattcaacataagatttgggtgggggggatacaaatccaaaccatatcacaggacctgtgttcccacctcctaaacctgggtgggacttgtgactgctccaaccaatggagtatgaaggaattgagtcaatgaggttttgaaggttgagtcatagaagatggctttcacctggcctgtctttctccctctctctctctctctttcttccctccctccctccctccctcactcccttccttccttcttccctcccttcctcacttcctctctctctccctccctccctctctctttctcccttccctcgcctcccctcgcctcccctcccctcctcttcctttcttcctttcttccctgcttgcttgcttgcttgctcgctctgctgcccaggctggagtgcggtggtgccatcatagctcactgcagcctcaaactcctgggcacaagtgatcctccccagcctccccagtgcctgagactacaggcacatggtgcctcatctgcctgatttttaaattttttgtagaaatggggtcttgtggcagacgtggtggctcacgcttgtaatcccagcactttgggaggctgaggcaggtggatcacctgaggtcaggagtttgagaccagcctggctaacatggtgaaaccctgtctctactaaaaatacaaaaattagttggcaggggtggtgggcgcctgtaatcccagctacttgggaggctgaagcaggagaatcgcttgaacccgggaggcggaggttgcagtgagttgagattgtgccactgcactcctgcctgggcaacaagagtgaaactccgtctcaaaaaaaaaattttttttttttgtagagatgggcgtctccttatgttgcccagactggtcttgaactttgagcttcaaatcctgcctcagcctctagagtagctggaattgtaggcaagagccactctgtctggtggtttttaacagttttttttttttttttttttaagagacagggtctcaccaggcgcagtggctcacgcctgtaatcccagcactttgggaggccaaggcaggtggatcacctgagatcaggagttcgagaccagcctgaccaatatggtgaaaccctgtctctactaaaaatacaaaaattagctgggcgttgtggcatgcacctgtagtcccagctactctggaggctgagacaggagaatcgcttgaacctgggaggcagaggttgtggtgagccaagattgcaccactgcgctctagcctgggcaacagcaagactccatctcaaaaaaaaaaaaaaaaagagagacagggtctcaatttattgcgcaggctggagtgcagtggtgcaatcatagctgcagtcatagctcactacagcctcaaactcctgggctcaaggatcctcccagctcttctaaaatattagccggagggtgggtagcatgtaccaactcttgggcttagtaatcctcctgcctcagacttccaaatcgctgggattacaggtgtgaaccactgcacctggccctcttgtttctaaggatatcagtcattggatttagggcctaccctaaaatccaagatgttctgatagtgagatctttaacttaattccatctgcaaagaccctatttccaaataaggccacattcacagataccaaaggttacacatttcttctttcttcttctttcctcctcctcctccccttcccttccttttttttttttttttttttttgagacggagtctcgctctgtcgcccaggctggagtgcagtggcacaatcttggttcactgcaagctctgcctcccgggttcacgccattctcctgcctcagcctccacaatagctgggaatacaggcgcccgccaccatgcctggctaattttttgtattttttagtagagatgaggtttcatcatgttagccaggatggtctcgatctcctgacctcgtgatccgcctgcctcggcctcccaaagtgctgggattacaggcgtgagccaccgcgcccggccccctttcttcttctttcttcttttttccttcccctttcccttctcctcctcccccgcctccctccccttccctttcatcttctttcttccttccccttcttcttctcctccccctccccttccctttgttcttcttctttcttctttcttcctttcccttccccctgctcctcctcctgctcttcttctcttttcttctttcttttcaggctcttaccctgttgcctaggctagagtgcagtggcacaatcatgtctcactgcagccttgacctcccgggctcaggtgatcctcctgcctcagcctcccaagtagctgggactacaggcatgtatcaccacacctggctaatttttaaaatttttttgtagagatggggtattgctatattgcccaggctggtcttgaactcctggactcaaaggatcctcctgcctcaggctcccaaagtgctgggattacaggcgtgagccaccgggcccggcccatacatatctgctttggggccacaattcaacctgctacaatcacaatagatgttgtgatttttccacctctttctctttttttggacttgtttttcatagtctggggcataattcatttaaaccattttctttgattgatgaaccgtacattgttgccaactctttgttctttcctagttttttgtctgcactgtattgtactggagaacaaatatttctccaagaagtgttcccactggtggaaggacaggctggtttttggtttttgggtgttttttgagacggagtttcactcttgtcacccaggctggagtgcaatggcatgagctcagcccactgcaacctctgcctctcgggtttaaatgattctcctgcctcagcctcccgagtagctgggattataggcgcctgccgccatacccggctaatttttgtatttttggtagagacggagtttcatcatgttggccaggctggtctcaaactcctgacctcaggtgatccgccggccttggcttcccagagtgctggaattacgggtgtgagccatctcatccggctgatgggctggtttggttttttgttgttgttgttgttgttgttgttgagacagagtcttgctctgtcaccaggctggagtgcagtggcgtgatcttagctaactgcaacctccgcctcctgggttcaagtgattctcctgcctcagcctcccaagtagctggaactacaggtgtgcgccaccacacccagctaatttttgtattttttaagtagagacgggtttcaccatgttggccaggatggtctcaatttcttgacctcaggatctgcccaccttggcctcccaaagtgctgagattatgggtgtgagccaccgcgcccggccgatgggctgtttttgtgttctgggttgggtaggataagatagttcccacttggctttctagatccacttttcacgcgcctctacttggctctggttctttggacagatctggggttccctggtcctctgccttccatctggggtcagacaactgagaggagatggatggcaggacgggagtgaattcagcttcaagcctgtcctgagaacaggtcactcacctgacccagagccatggtttctggggatggcaacatctgcccagtgtcccagggtgctagggttgtgattgaagccttttaaaatttttatgtatttagttagttattgtttgtttgttagtttgttattgacacagagtctcaccctgtcacccaggctggagtgcagcagcaaaatcatggctcactgcagcctcaacctcctgggctcaggcgatcctcccacctcagcctcccgagtagctgggagtacaggtgcaggtcaccacacccagctaattttttaatttgtttctagagacggggtattgccacatccaggctggtcttgaactcctggactcaaggagtgatccgcccgcctcggcctcccagagtgctgagattataggagtgagccactgtgccggcctttgaagcttttcctgcaaattctcttatctttatgacagacctcagtcacccactgtgattgcaggatgcttcccatggggatcgtaaccaaaaagcattcttctccaggagcttttcctgatagcaaatgcgttagattttgggaacatctaaaaataactttttcttcttttttgttattataggcaggaaatacgctatgtgtaaaccagaagactataaagatctccacatttccagccctgaggaaaccactgctgatctttaggtgtctatcctttttgtcttttttttttttttgagatggtgtcttgctctgttgcccaggctggagtgtagtggcgtgatctccgctcaccgcaacctccgccccccaggttcaagtgattctcctgcctcagcctcccgagtagctgggattacaggcgcctgccaccatgcctggatactttttccatttttagtagagacggggtttcaccatgttggccaggctggtctcgaacgcctgacctcaggtgatccacccgcctcgggctcccaaagtgctgggattacatgtgccaccatgcccacccttctttttttgttttttgtttttttgttgttgttcttgttgtttctaagacggagtctccctgtctgtcacccaggctggagtgcagtggcgtgatcttggctcaccacaacttctgcctcccggattcaagcaattctcctacctccgcctcccaagtagctgggactacaggcgactgccaccacagctaatttttgtatttttaatagagatggagtttcaccatattggtcaggatggtctcgatctcctgacctcgtggtctgcccgcctcagcctcccaaagtgctaagattacaggcgtgagccaccgcgcctggccattttttttgtttgttttttgttttttttgagacagagtctcccactgtcgcccaggccggagtgcaatggtgccatcgcggttcattgcaagctccgcctcctgggttgacaccattttcctgcctcagtctccctagtagctgggactacaggcacccgccaccacgcctggctaattttttttgtacttttagtagagatggggtttcaccatgttagccaggatggtctctgtctcctgacctcgtgatccgcctgcctcggcctcccaaagtgctgggattacaggcgtgagccaccgcgcctggccccccccttctttttttttttgagatggggtcttgctctgttgcccaggctgggatgcagtggtgtgatctcggctcactgcagcctccatcttccgggttcaagggattctcctgcctcagcctcctgagtagctgagattacaagggcgtgccaccacacctggctattttttgcattttttgtagagacgggtttcactatgctggccagactggtcttgaactcctgacctcaggtgatctgcctgcctcagcctcccaaagtgctgggattacaagcctgagctgctgcagccagcctccctcttgtctttctcaggacagggctctgggatcagacagagccgggcctgaatgcctgcctgaccacgatatgctctgtgagcttgggcaagtgtctcaacctctctgagcttcagtttcctcatttataaatggtgtaagcatagtgccaactttgtcagattgctgggtgtaaatgccctgaggttgataaatgtcggttcctactatgtcaccaggctggagtgcagtggtgttatagctaactgcagccccaaactcttgggctcagacgatcctccccgtcagcctccctagtagtagtatgccatgactgtctaatttttttttttttttgagatggcgtctcgctctgtcacccaggctggagtgcactggcgcaatctcagctcactgcaagctccgcctcctaggttcacgccattctcctgcctcagcctcccaagtagctgggactacaggcgcccgccactacgcccggctaatttttttgtattttttagtagagacagggtttcaccgtgttagccaggatggtctcaatctcctgaccttgtgatctgcctgcctcggcctcccaaagtgctgggattacaggcatgagccaccgcgtccagccatgcctggctaattttttaaaaggtttgttttagagacggggtctcgctttgttgcccaggctggtctcgaactcctggtatcaagtgatcctcctcctcagcccctcaagtatctgggattacaggcacaagccaccaccccggctacaggaatgttatataacagatgttcaaattcttcttcaggctttctatagataacaggatttcagcccctcttctatgtgacccaggccaagttttggtcttgttccacagtcctagaacctgccgtgtttttttgttttgtttttttttttttgagacggagtctcgttctgtcgcccaggctggagcgcagtggcacgatctcggctcactgcaagctccgccccccgagttcacacagttctcctgcctcagcctccgagtagctgggactacaggcacccgccactatgcctggctaatttttttgtatttttaatagagacggggtttcatacctgccattggtttttaagatcttatgtctgggccaggaatggtgactcacacatgtaatcccagcactttgggaggccaaggtgggtggatcactggaggtcaagagtttgagaccagcctcgccaacatggtgaaacctcatctctacttaaaatacaaaaagtagctgggcaaggtggtgcacgcctgtaatcccagctacttggcaaactggggcatgagaatcacttgaacccgggagttggaggttgcagtaagctgagatcatgccactgcactccagcctgggcaagagagggagaccctgttgaaaaaaaaaatttaaggccgggtgcggtggctcacgcctgtaatcccagcactctgggagcctgaggcaggtggatcacctgaggtcaggagttcaagaccagcctggccaacataatgaaacccgtctctactaaaagtacaaaaattagctaggcatggtggcgcgtgcctgtaatcccagctacttaggaggctgaggcaggagaattgcttgaacccaggaggcggaggttgcagtgagccgatattgagccattgcactccagcctgggcaacaagatcgagactccgtctcaaaaaataaataaataaataataaatgtaagtgagaccaggtagactggtgcatgcctataatcccagcactttgggagactgaggtgggaagatggcttgagcccaggagtccaaggctgcagtgagctatgaccgtgccactgcactccagcctgggccacagaatgatagacaccttatctcttacagaaaaaaaaaaaaaatcaagtgaatgtttcattgagtgcttactaagttccatgcacaaaggctaaacaccttgacagacactattttctataacagtcacaagaacccatttgaaagaaaggagggctgggcgcggtggctcacgcctataatcccaacactttggaaggctgaggcaggcggatcacttgaggtcaggagttccagaccagcctggccaacaaggtgaaacccggtctctaccaaaaatacaaaaattagctgggggtggtggctggcgcctgtaatcccagctactcggaaagctgaggcaggagaatcgcttgaacctgggaggtggaggttgctgtgagcggagatcgtgccactgcactctagcctgggcaacagagcaagactctgtctcaaaaaagaaaaaaaaagagaaagaaagaaaggaaggaggatcaaggcactgcaagtaagtggaggaggaggcaagatttcactccatcctttgccgtgagtactgtcggtatatccccctaagttgtgccttgtctccatttgacatcaccaagcttgttattattgtgtctaaaccacaagcaaattggctataagtgagggccacaaccatcagttcaacttgaccagaatatagtaaccacccaccacatgctagaccttatacttgtcaaggaaaaacagctcagatctcccaccttcctggagcttataagacttcggggtcacctcctttagcttatgcatagacttttattttattattatttattttcgagacagggtctcgctctgttacccaggctggaatacagtggtgtgatcttggctcactgcagcctcaacctcctgggctcaagtgattctcctgcctcagcctcccaagtagctgggaccacaggcatgcgccaccacacctggctactttttgtatttttagtagagatggggtttcaccatgttgcccaggctggtctcaaattcctgacctcaagggatctgccctccttggcctcccaaagtgctgggattactttccaggtgtgagccaccgcgcccggcctgcgcagacctttaaatatgcgcttcagttcttagagagttttaactgcactggatgctaagttgagtttcagataaaggtgtcagaacaatggctgggggacaataaggtgctgttactggtgatgccttgtctcgggagggagcaattttgggagtgggaaggggacaaaagaaactgtagtccctagggataagggctgaagccctggtccccaaatgcttgcatttggatcccagattcattatttacttgtggtgtgaccttggacaaggcctctcattgtcccgtgcctcagtttctccatctgtaaagtagacctggtcttagtaacctgctgcctagaactgtggtgcgaactgagggagctatgcaaagctttagacagtgactggttggcggcaagcaatcaatcaatgaagcctccatcacagtgatcccttgggctccccagggagtagcagtttggaggacccagattctgaacccacagagttggtgtggaagaggaagagggagcctggtgagccccccacttacacccccagaagccttggagccaaagcagccggaccccagccccagcttcagaggagctgccttgggggtggggctgccccggggctggcccagccccagcaagcttgttaattacttctcagggtcacggtcttaaggagcccctccgaggggatctttgcccagccctctgtttattgatcgcatctaatctctccgcaggcgggcgggcctctaaatcctgcttaactctcggttcctgccctttccgggcagggaggcccccgggctgggtttagctcgcagcgaatgagggctggaaaactggagcgcattgggagacctctagggcccccctaaaacagagaagggatggtgggttccccccccacccacaagcatctcgggactcccaacacctacccacctgtgggcgaggacaccgctcgtttttgcccctcccaatccccgatcttggaatccacttcttgtggctccagaatccaggtagacggcccccacttccccctcggccagccctggcctcccttggtccccatcaggggaaggaggatttgggagctggggagccgccctgacttgctgttctcctttccttaaagaaaccagcgccgctggagggagtggagcccctggcccccggcctggctcggctctttgccgaggtgattaggatgcgtcctccgagggcgcacggctttaacccgagttgccagcgcttttcgggccccgggcgatgtcggttgttcagggggctctctgggtgcctggctggcctccgttcccacctttgaagtgagctctggttggatggtgggaggagcgggggcgaggcggggtgttctgctgggccgggtctgggaggaattcgcgggaaatgcgggggcttaatgggggaaacagaggcagtatcaaatagacggcctgctgacatttttaaaaatgtttttacaatttttgtttgtttattttttttgaaaccaggccttgctctgttgcccaggctggagtgcggtggcgtgatcatagctcactgcagccttgaagtcctaggctcaggtgagcctcccaccttggcctcctgagtagctgggactacaggtgcatgccaccacgctatgctaaattttgttttctttctcggtagagaaggggtctcactatgttgcccaggctgtggcaggctgagcatgagtggctcatacctgtaatctcagcacttttgggaggctgaggcaggattgcttgagtccaggagtttgagaccagcctgggcaacatagtgagaccctgtctctacaaaaaaaaaaaaaaaaaaaaaggcaggtatggtggcacacccctagtcccagctactcggggagctgaggtagtaggatcacttgagcccaggagttttgagtctgcagtgagctatgatcgtgccactgcactccagcccgggcaacagagtgagaccctttctcaaaataataataataacaataaaatataaaataaaataagaaacaaaaacttggaagacagagcagcctaggttcgaatcctgcctccaccacccagcactgggagatcctgagtgagtgactttgcttcttggagctctctcctcgcctctgacttctcagctgctctgggtcaggaactgaatgactaaaagggcctggttcagaatgagtgctcctcctggccaagagaggaggaggaaggacaggggtgggtgggacagctgtagggatccgggctggtgggttggggaggttgccggctcctaccttttagagctcccaggctgtagaccaaaactgacatgaatacctgctcttgcccagcggatgtggatgcccagggggtctctgggtggggaagaagtgggtgtctattggcccagtggtaaaaggtctaagtaaaggatctgggtcttcagtttatatttccctaggaatgtgtgatggagcgctatgaccagacatgagtgtggtcagagatcagaaccaggcaccagtgtgccctgacctgtgcctcagtggttgcacattcctggtgcacacctggtgtatacctggcacacagcacatacctggtgcacacctggcatatacgtggcacatgcctgccacattcctggtgcacaccgggagtatacctggcacacacctgccacattcctggtgcacacctagcgtatacctagcacacacctgccacattcctggtgcacacctggagtatacctggcacacgcctgccacattcctgatgtacacctggtgtacacctggcacacgcctgccacattcctggtgcacagctggtgtacacctggcacacacctgccacattcctggtgcacacctggtctatgcctggcacacacttggtgtacacatggcatatatctttcaggctttcagccactgatccatcttggtcttgctcacccagtgtcagagaggcatcaggtacctgagtgagatcacctttcttgatgaaacacaaaattgggaaccacataaagagcactcactatataccaggtgctgtcttaagtgagttaactttcattaactcattttattttcacaagatgctgttagttggacgccattcgttctgttggccagatatttcctgctcttgcctttcctgtgagcaagatagtataattgagtacccccacttctctttttcttttctttcttttttttttttttgaaacagggtctcactctgtcacccaggctgaagtgcagtggcacaatcatgatcatggttcacttcagtgcagcctctatcacccaggctcaggtgatcctcccacctcagcctcctaagtagctgggactacaggcgtgttccatcatgcccggctaattttttgtagcgatagggtctcattatgttgcccacgctggtcttgaactcctgagctcaagccttctactttcctcagcctcccaaagtggtaggattacaggcatgagccactgcaaacagccacccccatttttctaagatatggtttattttttctctctctctcctcttttgtcattccctggttccccacttcctactcagccctttagaaatacaaatataggccgggcgtggtagctcactcctgtaatcctagcattttgggaggccgaggtgggaaaattacctgaggtcgggagttcacgaccagcctggccaacatggtgaaaccccgtctcacagtggcacgcgcctgtaattccagccattcgggaggctgaggcaggagaatcgcttgaacccgggaggcggaggttgcagtgagccgacatcacgtcaccgcactctagcctgggctacagagcgaggttttgtctcaaaaaaagaaacaaacaaacgaacaaacaaaaacgaacaaaaaaccccaaatataaccttttactccttcctcccccaacgcccccttgattcaccagacactccctacagggcaagttcattaaactcctcaagagttgacagttgatttagagaccaaagcatgcctgctgcagaactctcacccatcaggaggttgcctcaagaggtaacagccaaatctacgaaactccctccatcgggagactacctcgaaaaactcccacctggggagattttggcctagtcctgtccacaaaggtgccagcagcccctagctcaaccgcccagtagataaggcaccagagctaacatgcgccccccaccctactttttcccctgccttttaaagtgctggctttctgctccaaaacggaagcagtatgtttgaaggtgggacgcctgtgcttcttcccctaagctagttttggaataaatcactttctttagaccagacctagctctcgttaattggacttcgcaagctggcaagtgactaacccacattttggttacagtagctgcacttcatgcccaccttgtgttggatgaggtcatgtgactagctctaaccaatgagctgtgagtgaaattgacaggcattattcccaaactacagcatttaattgcctgtgtgagatcccccaaagctcttacttccttccagcgtgacagcaagcaatgtttcataatgttccagaatgtggctgttccatcggagactatgatgagcagaacctccttgcaacgacccaaaatggacatgaagcctgggtgaggaataaacgttgtagttttaaggttcttgggctagtttgtttctgcagcatgacctagcctatcctaaccattacaaattacacacccctttttacaggtgaagaaactgaggcatagacaggttaatcactgttcttggtcacccagctagtaagtgacaaagtgatagagtcaaggttagaatccggacagtctgactctaaagtctctgcttgcttgctttctttttctttctttccttctttctttctttctctttctttccttttctttctttttctttttttctctttctctgtttctctctctctctctttttctctctctctctctctttctctctttcttcctttcttggcggagtttcactcttgttgcccaggctggagtgtaatggcgcgatctcagctcaccgcaacctttgcctcccaggttcaagcgattctcctgcctcagcctccccagtagctgggattacaggcatgtgccaccacgcccagctcattttgtatttttagtagagatgggatttctccatgttggtcaggctggtctcaaactcccgaactcaggtgatcctcccacctcggcctcccaaagtgctgggattacaggcatgagccaccatgcctggctttttttttttttttttttttttttttgagacggagtctcactctgtcggccaggctggagtgcagtggcacgatcttggctcactgcgacctccgcctctcaggttcaagcaattctccagcctcagactcctgagtagctgggactacaggtgcacgaagctacgcctggcttttttttttttttttttttttttttttgtattttagtagagacggggtttcaccgtgttacccaggctggtcacgaactcttgagctcaggtaatctgcccgcctcggcctcccaaagtgctgggattacaggcgttagccaccgtgcccggccccggctttttttttttttttttttttttttgaggagtctcactctgtcacccaggctggagtgcagtggcacgatcttggctcactggagcctctgcctctcgggttcaaatgattctcttgcctcagcctcccaagtagctgggattacaggcggagatcatgcccggctaatttttgtatttttagtagatggggtttcaccatgttggccaggctggtctcaaactcctgatctcaggtgatctacatacctcagcctcacaaagtgctgggattacaggcatgagccactacacccaacctctttttctatttttagagacagagtcttgctctatcactcaggctggagtgcagtggtattatcacagctcactgcagcctcaaacctttttttttatttttagagacagagtcttgctctatcactgaggctggagtgcagtggtgtgatcatggctcactgcggcctcagacttccgggttcaagcaattcctctcacctcaccctctgaagtagctaggactacaggcatgcaccaccacccctggctttctttttttttttttttttttgtagaaactaagtctcactatgttgcccaggctggtctcaaactcctggcctcaagcgatcctccagcctcagcctcccaaagtgttaggattacaggcatgagccaccaggcctggtctgctgttgtttctaaactgttatcttcggtggcggggggggtccctaaacatatggaaaattcacaaactgcaacagattctggatgaggttggcctttgctgtcctgttgcctctgataatttttttttttttttgagatggtttctcgccctgtggcccaggctggagtgcagtggcgtgatctcagctcactgcaacctccatccacctcctgggttccagcaattctcctgcctcaggctcctgagtagctgggactataggcatgagccaccacgcctggctaatttttgtatttttagtagagatggggtttcttttttcttttctttttttctttttttgtgagacggagtctcgctctgtcacccaggctggagtgcagtggcacgatcttggctcactgcaagctccaactcccaggttcacgccattctcctgcctcagcctcctaagtagctgggactacaggcgtccgctaccacgcccagctaattttttttttctatttttagtagagacggggtttcaccgtgttagccaggatggtctcgacctcgtgatccgcctgcctcaggctcccaaagtgctgggattacaggtgtgagccaccatgcccggccaagacagggcttcaccatgttagccaggctggtctcgaattcctgacctcagttgatccacctgcctcagcctcccaaagtgctgggattacaggcatgagccatctcgccctgccacccctgatcatttttggcttcttgtttctttccctcttgagcactggctctcttggttggtttctctctagcatctcccctgggggagatctaggaggctggacaagaggattgagtaacatcctcctccctctaacacccacctggaccctttagttccttcagccttacacctccaatcccctctgatctccttgccaatcccctgctctgcctacactctgatcacatgagccctaacacttcctcctaagggctggagaacaattgtttgctacagggagaaaaatcctcaagccagagagctgagccattagactcctgggtcctgaggagagcccggagctgaggtttcagaaatgtcttctcacctcttcatcccttgggctgcctcctgtcacttcccggggtctctgagtcccctctgcactcagaagctcccagggaggaccagccagacagggctcaggacacttacaggcaaacctccactcctcccgccctgaccagttaacgcgacacttattctacattaaataccaattggaccaattttctgctgtaattaaaacctctgcagacgtgttccctgctcagcagtgatgagtttattaacctccagctctgaaggaatgtgggggcaggggagagggaaggaaagaagagagttttccagattaggagattggacccagggagagggtgggtttggagctgtgctgtctcctagctgggctctgagcaagagacagatgggggtgtgtgcgaaagcattaacatctgtgtgtttgctgcctctgcagtggggacttgcaaatatctacccccaccaccctgacctgctacagaaccaggactgccctcccataatcaagtgtgttttatagccctacttcccaaattattggcaggcagcatgtcctgaatctggaaatacagcctctttcagttcaacaatctggccttgtatgggatcgtttgttacgtagcataacttaggttatctgactattacatattgtatctccacttcatagctggtgaaacaggcacatgccaccatgcccagataattttctcctctgggcaggagacagatggaggcgtgtccaaaagcattgacaactattgtgtttgccgcttctgtggtggtgacttggaagtatctgaacccccatcaccctgacctcagtttcacaacagaggcccagtttgcatacaaacctaggtgaggtcatgaagggttcatagcttgcagccatagaggctggaaatcaatgcctagtacatccctggcagctcaaggagtcagctcatttctgttcattagagatcacagaatcatcacgttctctctctctttttttttgagatggagcctcgctttgtcacctaggctagagtgcagtggcgcaatctcggttcactgcaacctccgcctccaggattcaagcgattctcctgcctcagcctcccgagtagctgggactacaggaatgtgccactacgccccgctaatttgtttgtatttcagtagagacggggtttgaccattttggccaggctagtctcaaactcctgacctcaggtgatatgcccacctcggcctcccaaaatgctaggattacaggtgtgagccgccatgcttggctattctttttttttctgagatgagatttcactgtcctccaggctggaatgcagtggggcaatcatagctcactgcagcctcaaactcttgggctcaagccatcctcggcctccagagtagccgggaccacaggtgcacaccaccatgcctggctaatatttttttttttttactgcttgtagagatgggggtctcactatgttgcccaggctggtctcaaaactcctgggctcaagcaatcctcctgcctcagcctctcaaagtgctgggattacaggcgtgagccgcagcgccccgtcctgctcatttccttttattaccaacaattctccattctttatttttaatatccccttcattcaccagggctcaactttgtcatccaacttttattgctttgtggggaggaacgcaaccaaagagacactgggaggcaatgacctcatggaacaaggaagctgtgttggacatctggaatggagttggatttccaccatggcccaaaacacttccaattcctccttctagcatgtttcgaaccctgtggccaacactgccatttgtcacctttttgaatgtgttggattatctgttagcctatctacatcttgttttcctgtgtatttcaggggctggaattctggcaactactccttgtctaagattctgttgccaggagggttacagggtggattctataaatgaggagcatcagatcgtcgtggtggctcacacctgtaatcccagtactttgggaggccaaggcaggcggatcgcttgagctcaggagttcgagaccagcctgggcaacacggtgaaagcccatctctactaaaaatacaaaaaattagcagggtgtggtggcacatgcctgtaatcccagctactttggaggctgaggcgggaggatcacttgagcctgggaggcagaggttgcaagtgagctgagatcacaccattgcactccagcctgggtgacaagagtgacactccgtctcaaaaaaaaaaaaaaaaaaaaaagagagcgagaacatgtggcctgcaaagacagaaatatttagattctgatccttgatggaaaaagttttccatcctctgctcttgacttcatttggtcattcccacaatgaataagttagttctaggatcttggagcaaacatgtctgtattagtctgttttcacaccgctataaagaactatgtgagagtgagtaatttatgaagaaaaaaggtttaattgactcacagttccgcatggctgatggggcctcaggaaacttacaatcatgacaaaaagtgaagggaaagcaaggcacatcgtacatggaggcaggggagagagagagagagagagagagagagagagaggagagagagagagagagagagagagagagagagagagagagagagagagagagagagagaggaagtgccagacgcttatcaaacaaccagatctggtgagaactcattgtcacgagaatagcaagggggaaatgctcccgtgatccaatctcctcccaccaggtccctcccctcgacacgtggggattacaattctagatgcgatttgggtggagacacagtcaaacatgtcagtgttctttctctaaggctccattttgtcctctgtaaaatggggtgagaggcccctacttaactgcacgagcttgctctgcaattaaaattgcatgtcatgggccaagggactttgaaagtgggacagctcctgcaggtgcttttggctggagtcacaggatccaaaaccccccagtaatccccacatctttcctttcttttctctctcttttcttttttctctttctctttctttcttttctttctctctttctttttctctttcttccccctctctccttcccttcccttccctccctccctcccttccttttccttttttctgagaaagagtctcgctcttatcacccaggctggagtgcagtttcgtgatcttggctcactgcaacgtctgcctcctggattcaagctgttctcctgcctcagcctcctgagtagctgggattacaagcgcccaccaccacgctcagctaatttttgtactcttagtagagatagggttttgacatgttgaccaggctggtctcgaactcctaacctcaggtgatccgcccaccttggcctcccaaagtgctgggaatacaggtgtaagctactgcgcccagcccttttctttctttcttttttttttttttttgagacagagtctcactgtgttgcccaggctggagtgcagtagtgtgttctcagctcactgcaaccttcacctcccgggttcaagctattctcctgcctcagcctcctgagtagctgggataacaggtgcctgccaccaagcccggttaatttttgtacttttagtagagacagggtttcaccatgttagccaggctggtctgaaactccttactgtcaggactctgagcccaagctaagccatcataacccctgtgacctgcacgtatacatccagacggcctgaagcaactgaagaaccacaaaaaaagtgaaatagtcaattcctgccttaactggctaatggtggatgacattccaccattgtgatttgttcctgccccaccctaactgatcaattgactttgtgacattccttctcctggacaatgagtctcaggagctccccaccgagcaccttgtgacccccgcccctgcccacaagagaaaaccccgtttaactgtaattttccactacctacccaaatcctataaaactgccccacccctttgctgactccttttttggactcagtccgcctgcacccaggtgattaaaaagctttattgcttacagaaagcctgtttggtggtctcgtcatatggacgcatgtaatactgacctcaggtgatctggctgcctcaacctcccaaagtgctgggattacaggtgtgagccactgtgtctggcccttttctttctttttagtggaaatggggtcttgccatgttggtcaggctggtctcgaactcctggcctcaagcaatcctccctcctcagcctcccaaagtgctgggattataagcatgagccactgcacccagctacctttctcagttctgccttaatgtctcacgtggctgttttccttttctcttgtgtattctttcctccccctctgtcttcttgctttttttttttttttttttttgagagagagtctcattctgtcactcagactggagtgcagtggtgtgatcttggctcattgcaacctctgcctcccatgttcaaacgattctcccacctcagcctcccaagtagttgggactacaggcgcacgcaatcatacccagctaatttttgtatttttagtagagacagggtttcaccatgttggtcaggctggtcttgaactcctgacctcaagtgatccgcccacctcagcctcccaaagtgctgggattacaggcgtgagccaccgctcccagcctctacttgctttttccttctcacacctctctcttctcttctggttccctctcccagccttctctctgcacctcctcccctgccacttgctctcttcaaactcggggatgtgagaaagttcccgcagaaattgcaatctcctctcctctcatgtggctccgagataagacagtaaaaatccgattttcagcaatttgcttcatttgtgagctctccggagtctccctttctccccctgacataagcttagcaaaattgcctgggtggagtggatatttttaaccacttagtagtcagagcgggttcagaaagttttgcaagaaaccgggccaggccctgtgcctggggttgctggcgggtttggggctggagggaagcacgtggggtggcctcaaagggtttagtggaggggcatttaagaagaggatgtccgccggccatggtggctcaagcctgtaatcccagtgagaggtgacagtgtgctggcagccctcgcagccctcgctcgctctcggcgcctcctgggcctcaggcgcccactctagccgcgcttgaggggcccttcagcctgcggctgcaatgtgggaacccctctctgggttggctgaggccggagccagctccctcagcttgtggggaggtgcggactggtggaaaccagggctgcccgctgcacttgcaggccagcgtgagttccaggtgggtgtgggctccgtggccccgcactcggagcagcaggctggcgctgccggccctgggcagtgaggggcttggcacccgggccagcagctgcggagggttcgccgggtcccggcgctgtgctcgaattctcgctgggcctcagctacctccccgccgggcagggctcgggatctgcagcctgccatgcttgagccttcccccaacgccatggcctcttgtgcggcctgagcctcccctaccagcgccgccccctgctccgcggcgccgggtcccaccgaccacccaagagctgagaagtgcgggcgcacagcgcgggactggcaggcagctccacctgctgccctggtgcgggatccactatgtgaagccagctggactcctgagtccagtgggacttggagaacctttatgtctagctaagggattgtaaatataccaatcagcactctgtctagctcaaggcttgtaaatgcaccaattagcactctgtgtctagctcaagatttgtaaatacaccaatcagcactctgtgtctagctcaaggtttgcactctgtatctagctaatatggtggggacttggagaacctttagtgtctagctaagggattgtaaatacaccaatcagcactctctgtctagctcaaggtttgtaaatgcaccaatcagtgctctgtgtctggctaatctagtggggacttggagaacttttgtgcctagctcagggattgtaaacgcactaattggcaccctgtcaaaatggaccaatcagctctctgtaaaacggaccaatcagcaggatgtgggtggggccagataagggaataaaagcaggctgcccgagctagcagtgccaacctgctcccattcccgtccatggtgtggaagttttgttcttttgctctttgcaataaatcttactgctgcacactctttgggtctgcattgcgtttatgagctgtgacactcaccgcgaaggtctacagcttcactcctgaggccagtgagaccaggaacccaccgggaggaatgaacaactacagacgtgctgccttaagagctgcaacactcgccgtgaaggtctgcagcttcactgccgaagccagcgggaccaccagcccgccagaaagaagaaattccaaacacatccgaacatcagaaggaacaaactcccgacacaccacctttaagaactgtaatactgcaagggtctgcggcttcgttcttgaagtcagtgagaccaagaacccactgattctggacacaccagtactttgggaggccaaggcgggtggatcatgtgaggtcctgttcaagactagcctggccaacaggatgaaacaccgtctctactaaaaatacagaaaattagccaggcatggtagcacatgccttgtctatagtcccagccgctcaggagactgaggcaggagaattgcttgaacccgggaggtggaggttgcagtgagctgagatcgcgccactgcactccagcctgggtgatggagtgagactctgtctcaaaaaaaaagaaaaaaaatggatgtgactgaagaaagaaaagaggttccctttggaagaagcagatctgctcttgagggggtgaagctgcaggggaacgcccaggctttttccctcccaccagtacctccttttggctgaatccaaccccaaagcagagggcaatggagcccagtggtgtgggcctagaggtcagctctcaggacatagaacaggatggttggccggacgcagtggctcatgcctgtaatctcagcactgtgggaggcagagataggagaattgcttgaacctgggaggcggaggttgcagtgagctgagatcactccactgcactccagcctgggagacagagcaagactctgtctcaaaaaaaagaaaaaaaaaaaacaccaaaaaacaggattggactgcagattgatggaacctggggtaggtaacaggaatagagaatgacctgcatagaagccacatgtcctaacttcctaatacaccttagggatacccctgagaagccagtctggagaccaaaggcatctccttcccaaaaccaaaatggggggtgggaataatgaacatttagtgagcacctaccatgtaccaggcatatgctaagtgctttatgtgtacgacgtcattgaatccccacagaagtcaatgaaggaagcctttttctttgttggctgctgggacaaaaatcaaaatcacagtggctcaaggaattaatatagaatcagggtctcgctctcttgcccaggctagcgtgtaggggcacaatcatggctcactacagttttgacctccctaggctcaagcgatcctcccacctcagcctcccaagcaggtggaactataggcatgtgccaccacgcctggcaaattctaaagttttttgtagaggtggggtcttgttgtgttgtccaggctggtctccttggcctcccaaagtgctgggattgcaggtgtgagccaacatgcctggtccaatttagattttgttttttaagatggagtcttgctctgttgcccaggctggaatgtagtggcaccatctcggctcactgcaacctctatctcctgggttcaagcaattatccctgcctcagcctcccaagtagctgggattacaggcgcccgccaccatgcccagctaatttttgtatttttagtagagatggagtttcgccacattggccaggctggtctcgaactcctgatctcagatgatccacccacctcagcctctcaaagtgctgggattacaggcatgagccactgcccccggccccagtttagattttaaagaaattactaaggctgctaaaccttatgttgctctcagccccaagggcactgagagttgggttttcccgatcccaggcttcctgggtatagctcagaccacccttaaattttccacccatgctccctcatccattctttcttcccttctacaaattttcctcttctctgttggccaggaacatttacgcaataatgtcacaccagtgactaccagagttgaatgccgatagagtaacgggatgctaagatggacatttcaaccagggagacacaacgactagcaacagaagccagaccacagtgaagatctcttttcttttctttctttcttctctttctttctctctttctctttctctctccccctccctccctttctctctttctttcctttctttcttttcttttctattttttttttttttgagacggagtctcgctctgttgcccaggctggagtgcagtggcgcgatctcggctcactgcaagcttggctcactgcaagctccgccttccgggttcacgccattctcctgcctcagcctcctgaggaactgggactactggcgcctgccaccacgcccggctaatttttttgtatttttagtagagacggggtttcaccgtgttagccaggatggtctcgatctcctgacctcgtgatccgctcgcctcggcctcccaaagtgctgggattacaggcgtgagccactgcacccagcccttccttccttccttccttccttccttccttcctttccttcattcctttccttcattccttccttctttccttccttcctttctctttctttctccttccctccctctctccttccttccttttctttctcttttttttttttttgagacagagtcttgctctgtcactaggtaatcttggcttactgcaacctctgcctcccaggttcacgccattctcctgcctcagactcctgagtagctgggactacaggtgcacaccaccacacccagctaatttttgtattattagtagagacgaggtgtcaccatgttggccaggctggtctcaaactcctgaccttatgatccgcctgccttggcctcccaaattgctgggattacaggcgtgagccaccatgcccagcctttttcttttttttttgacagagtcttgctctgttgcccaggctggagtgcaatggcacaatcttggctcactgcaacttccccctcctggattcaagcgattctcctgcttcaggctctcaagtagctgggattacaggtacgtgccaccacgcctggctaatttcatatttttagtagagttgggatttcaccatgttggtcaggctggtcacaaactcctgacctcaagtgatccacccgccttggcctcccaaagtgctgggattacaggtgtgagctaccacatctgatccctaatttttaattgacaagtaattgcatatgtttatggagtatgatgtgatgtttcaatactgtatatattataaagcagatcgcgctaatgaacatatccatcaccttacatacttatttctttgtagcgagaacagtttgtttttttagagacagggtgtgtaaaatattgcccaggctggttttgaacacctgggctaaagtgatcctcccatctcagcctcccaaaatgctgggattacacatgtgagctaccgcaccagaccctatagtgagaccatttaaaatccactcatttcacaagtttgaaaatacattatggggtggggcacagtcactcacgcctgtaatcccagcactttgggaggccgaggcaggtggatcacgaggtcacgagttcaagaccagcctggccaagatggtgaaaccctgtctctactaaaaatataaaaattagccaggcgtagtggcgggcgcctgtagtcccagctcctcaggaggctgaggcagagaattgcttgaacccgggaggtggaggttgcagtgagccgagattgtgccactgcactccagcctgggtaacagaacgagactctgtctcaaaaaaaaaaaaaaaaagaaaaagaaaaaatatacattatgattagctatagccaccttgctgtgcaatagatcaccaggacttactcttcctaatggaaactttgtatcctttgggcaacatgttttccgcgaccccagactctggtaaggactgttctactctctacttcggtgaatgtgacttttttttttttagattctgcatacaagtgagatcatgaactatttgtctttctgcgccaggcttagtttacttcgcataatgtcctccagattcatgcacgttgttgcaaatgacaagatttccttcttttatcaggctgaacagtactccattgtgtatatgcaccacattttctttatccattcattcattgatggacacttaggttgcttccatatcttgttattgtgaatagtgctgcaaagaacttgggagtgcagatagctcttccgaatactgatttcctttgcacattactcggaagataaatttttttgagacagagtctcactctgtcgcccaggctggggtgcaatggcccgatctcggctcactgcaagctctgtctcccgggttcacgccattctcctgcctcagcctctggagtagctgggactacaggcgctcgccaccacgcccagctaatttttttttttttttttgtatttttagtagaaacggggttttaccatgttagccaggatggtctcaatctcctgacctcgtgatccacccgcctcggcctcccagagtgctgggattacaggtgtgagccactgcactcggcctaatttttgtatttttagtagagacagggtttcactatattggtcaggctggtctcgaactcctgacctcgtgatccgcccgcctcggcctcccaaagtgctgggattacaggtgtgagccactgcacccagctgttttgttttttgttttttgtttttttttcagacagggtctcagtctgctgcccaggctggagtgcagtggcacaatctcagctcactgcaacttctacatcctgggttcaagtgattctcccacctcagcctccgagtagctgggactacaggtggacaccaccacgcccggctaatttttgtattttttatatttttttagtagggacaaggtttcactggcgaggctggtcttgaactcctgacctgaagtgatccacctgccttggcctgagacaggagaatcgctggaacttgggaggcagaagttgcagtgagccaagattgccccactacactccagcctaggtgacagagtgagaccttgtctcaaaaaaaaaaagtgaaagtgaaagatttcattctgaacaccactaggtcctgaaaggcaaggttggctgacagcagacccagtgcaatgagaaccatctgacccctggatttgtttccttcctgtggccgctataacagtaccacaaactgagtcacttaaaacaacagaaacctattttctcacagttctgcaggccagaagtctgaaatcaaaacatctgcagggccacgctccccacagaggctctagggaggaatccctcctggccccttccagcttgtgagggctccaggcattcctcggtggcgaccacagcattccaacctctgcttccgtcttcacgggtccttctctactgtgtctcctctctgtgtctctcctaaggagagtcgtctgtggatttaggactaccatgttttccaggatgatctcatcttcagaattctaatatctgcaatgaccctttcaaaacccctcctacagagttgacaaggattgcatgccagattccagacagaaatacagttacaatgaaccatgaatcaggctgcactagggtccccttccttgctgctaaaggtcaggtagtacttttacaccccattgtttcaccaggcgcagtggatcgcgcctgtaatcccagcactttgggaggccaaggcgggtggatcacctgaggttgggagttcgagaccagcctgaccaacatggagaaaccctatctctaccaaagatacaaaaattagccaggcatggtggtgcatgcctgtaaacccagctactggggaggctgaggcaggagaattgcttgatcccgggaggcagaggttccagtgagctgagatcgtgccactgcgctccagcctgggcatcaagagcgaaactctgtctcaaaacaaaacaaaacacaaatacatcccattgtttctacagacaggatctctgacattaggagcatatggcttttttttttttttttttttgagatggagtcttgctctgtcacccaggctggagtgcactgacgtgatctcagctcactgtaaccgctgccttccgggttccagcgattctcctgcctcagcctccagagtagccgggattacaggcgtgcaccaccacacctggctaatttttgcatgtttagtaaagaaggggttttaccatgttggccaggctggtcttgaactcctgacctcaagtgatccaccgcctcggcctccaagtgctgggattacaggcgtgagccactgcgcccagtcaggatcatatggcttttgcttaaggatcgcttcagatgtttttgcagatcctgaattccagcaaccagtctgaagaagaccccccatataggaatgggatcagcatgagaatacagcttcttcacccaccccttgtccctcaactcctgcccaatcctctgtcccaagacttcatcttgcactctttgaccaatcaaaggatctccacacttgggcccactccataccccttaaaaaccccagccccaaattcctaggggagatgaattttttttttattttatttcatttttatttattaattttagtttgtttgttttctgagagaatctcactctgtcacccaggctggagtgcagaggtgcgatcttggctcactacaaccttcatctcccaggttcaactgattctcccacctcagcctcccaagtagctgggactacaggcacgcaccaccacacccggctaatttttgtatttttagtagagacagggttttgccatgttggccaggctggtctcaaactcctggcctcaagtgctctgcccacctcagcctcccaaagtgctgggattataggtgtgagccaccacacccacccaggagatggattttagatttgctcccatctcgtcgatctgtggccctatgattaaacctccttctctgctgcaaactggtatctcagcatgttgacttgcccagtgcctcaaacaatgggcctatgacagttacagtttatccacctaagatcacattcaggccaggcgcagtggctcgtgcctgtaatcccagcactttgggagtccgaggtgggaggattgctcaaggccaggaccttgagaccagcccgggaaacatagcaagaatctctctctgcaaaaaaatacaaaaattagccaggcacggtgttgcgtgcctgtggtcccagctacttggaaggctgaggtgggaagatcacttgagcctgggaagtcgaggctgcagtgagccaaaatcatgccattgctctctggccaccctgagtgacagagcaagaccatgtctttaaaaaaaaaataagttggccaggcgtggtggctcatgcctgtaatcccagcactttgggaggccgaggcaggcagatcatctgagatcaggagtttgagaccagcctggccaacatggggaaagcccgtctctcctaaaaatacaaaaattaggcggacgtggtggcaggcgcctgtaatcccagctactcaggaggctgaggcaggagaatcgcttgaacccgggaggcggaagttgcagcgagccttgattgcgccactgcactccagttgggagacaagagcaagacttcatctcaaaaaaaaaaaaataataataatataaaaacatcacattcacaggttgcaggggccagagtgtggacacatccttttggggggccaccatttgacacactatattccctcctggagctgcagccctggccgtgaaaggaaaggagaggaaagcaagaaggaaggggccctagcaccacccagacccccagaacatgacgctggtggggatggaggagaggtagaaggaaataggattgaagtctaaatcaaggccccagcttgggtctggacattccttgttttgaattgaagccaagctgccctgtgactaaggcgactccaggaacatctgttatctgagatgaacagagaacaaagtcataaggctaagattttatcaaggggattgcggggcaggggggacacatttccctgtgaaaagcatgttatagagatcatgacagatcagcccttgaccggaattcacacaatgctggttcatttcatcacagggaccacctgacccccaggattgttctagaaggtctttttctctaccatctccacaccaatccctctccacctgccgctcccaccttccactgggtccccatcctcctctgggctggggccctgcctgcctgccatccattcactcaacaaacacttattattattattttttgagacacagtctcgctctgtcgcccatgctggagtgcagtggcacgatcactgctcactgcagcctctgcctcccaggtttaagcaattctcatttctcagcctctcgaatagttgggattacaggcatgcatcaccacacctggataatttttgtatttttagtaaagacggggttttgccatgttggccaggctggtcttgaactcctgggctcaaatctgtccgcttggcctctcaaagtgctggtagttacaggtgtgagccactgcgcccagccctaacacttattgagcacctgctgtatgccaagggccagggaagggggcggcatacagagccaggagggaacagtgtggaggaacttcccttttggagctgactttccagtgggagacctgggcgatgacaagatgaacaaggaatgaatattctgtgttgtagccaaaagcagccagtgcaatggagaaaatacagcagcctcaggcctgtaatcccagcactttggtaggccgaggcgggcggatcacttgaggctaggagttcaaaaccagcctggtcagcatggcaaaaccctgtctctactaaaaatacaaaaattagccaggtgtcatggagcatgcctgtaatcccagctactcggtaggctgaggcaggagaatcacttgcactcggaggtggaggttgcagtgagctgagagcacgccattgcactccagcctgagcaacagcgcgagaccccgtctcaaaaaaaaaaaaaaaaaaaaagcaataagagtctgtggatgttgtaaattgggtgtgtgtgcatcagagaaggcttccctggggaggggcacaagtgaagggagacctggaggaggtgagggaggagccatgtggatatctggggaggatgactcaggcagagggaacagcctgtgcaaaggccctgaggcaggatgtctttggtgagtttggagaacagtaaggaggcccatctgcttggagaaagctgggttttctggcctccgtgaggactggagttttgctctgagtgaggcagttggtaaggagaataatgccctccttcccaaggtatctacttcctcatcctaaactttcaagatctcatggcctggggaggataggagaaaggggctggtaactgctccagcgggttgataaacatgggtacttcagggaggcttcctggaggagtgtcaagcatatgactggcttgaattgcgggagaggcaggctgagcagggagcaggtgcccagggagaggcagaagacaggtcagacacttaaaagtgtctaaaggagaaagactcctttggacacagccaggccctgagaagcagggttagtgaattgctacctcatgcaacaaaagggactttgctgattaggtaattaaggatcttcagacagggaaatgaccttggatcatctaatcacacaagtccttaaaatgcaagggggcggcagaggggagttgaaggctgtcatatgagaaggacttgactcgtcattgctggctttgaaaatggagggagggcccacgagccaaggaatgcaggcaacttctagaaacggggaatggacaaccagcaagaaaacagggcctcagttctacaaccccagggaactgaatcttgcacccctaaatgagcaaaaaatagatcatcccctaaaacctccaagaaaggactgcagcctgctgacatcttggtcttaggcaggtgagaccctgaaccacatctctgacctctagagctgtaggataatttgcgtcgttaaataaatgctagctagtgacggcaaccatgggaaattaacacaaggtgggagctttcccggttctgagcgggaggagggggcgtggcctgatcaggtgttcgctcgcgccctctggaggctgcggagggaacaggcttcagggccaggctggagacctgagcaagggtagagggaactgcacagtccaggtgagggatgctgggctggaccaggtgagggatgctgggctggaccaagtgagggccggggaggtggggaagaaatgaagtccgaggtttgaacgtggatggaaagagaaaaaaagagaggactccagcggggcacggtggctcacgcctgtaatcccagcactttgggaggccaaggtgggagaatcacttgaggtcaggagttcgagaccagcctggccaacacagtgaaacaccgtctgtaccaaaaatacaaaaaatagccaggtgtggtgctgcacgcctgtagtcccagctactcaggaggctgagacagcagacttgctcgaacccgggaggcggaggttgcagtgagcctagactatgccattgcactccagcctggaagacagagtaagactccatctaaaaaaaaaaaaaaaagagagagaggactcgagtcaaggatgaccagaagcctctgagctgggaacttggagtctcctgttccctccaccccaactccactagtccctacctccccttggcctcacctgccagcagttgtcccaggcggaggccacatgcttccctctcctctgaggccttgcccctgcctgtgacctctcacttgtcatatctgctgtctctgttctcaagacaggaagtcagatgggagttgaagacggctgggacctgtgagtccccaggcccccagagggattccggatttgagagtcggcctcctccctcccatccaagcccagccctgccaaatcagctcccagctcactccctggtctgcacctctttctctgtctctttctctctctggaattttcattctctttttggtaaccgaattatcccatctccacctctcactgggggccgcccgcagaggcgtgggcgaggaggggcccgggtcgcagcgcgagatattaaaccatcaatcacccgccaacgccgactcccccgcaccaggaccctccattggctccacctggaagcagaccagctccagtgcaggcctggaggcctggggaccccatcaaaatgggaggccttggaagaatctcacaggccctgcatctacctgggcaggtgcctgggtgcagatcggcctggctcaatgcacagacaaggtgtcctgggttcaaatccacaagctacttcttatccacacgtgggagccactgcattgttctgtgtcttggtttcaccacctgtaaaatggtgataacagccgggcatggtggctcatgcctgtaatcccagcactttgggaggctgcggcaggcagatcacctgaggtcaggacttcgagaccagcctggccaacatggcaaatatataaaaatctctactaaaaatataaaaattagccaggtgtggtggtgtgcccctgtaatcccagctacttgggaggctgaagcagtagaatcacttgaacccaggagtcagaggttgcagtgagccgagattgcactactgcactccagcctgggggacagagcgagactccgtatttaaaaaaaaaaaatggtggtaacattttctacatcattggggttcactgtcaggattaaaccagttaaggcagatggcaatatctggctgatagtaagtcctgtctaggatttgctgctagaatgattttccttcaagattgggggggggtcattcacttgtgaaagaaatccaagattctggcttttgaggggacttaatggggttcatacttgtgtcacctcacagctgctgccttgtataggttggaattggattttttttttttttgagatggagtctcgctctgtcacccaggctagagtgcagtgcacaatcttggctcactgcaacctccgcctcccaggttcaaggaattctcctgcctcagcctcccgagtagctgggactacaggcacgtgccaccatgcccagctaattttttttttatttttagtagagacggggtttcaccatcttggccaggctggtcttgaactcctgaccttgtgatccacctgcctcggcctcccaaagtgctgagattacaggcgtgagccaccgcgcccggccagaattggatttttttgttttttgtttttgagacaaagtcttgctctgtcacccagggtgaagtgccgtgtggtatgatcatggctcactgcagcctcaaccttctggatttaagcgatccttccacctcagcctcttgagtagttaggattacagacatgagccgccccacccaggtctaggggaaaaaaaattaaaggctctttcagaaccttaactagggccaagcaacgcatatttcaaggcactcaattcacaaaacaaggtctcagtgctttgcacaggctgttccccctgcctaaaatgctgttccctcagccagccacgtgactcctccttgcctgcttctgggtttgcggcaatgtcccctcctcagtgaggtgactttgcaaaaattgcacccagggcccctgcccgcccccacccctcccagctgtatttccctccatagcatgcatcccattttgcataccgtatgcagtgcttgtggggtttgtctgttcatcccactggagtgttaaacccagggcaaggttcattcattcactgcccagcacggcacctggcatgaaataaacacccagtaaatacttgttgagtgaatgcatgaacaaattccattcagctgctcccagaggaccccacaggctgcagccagctcaaagctgctctggctgggccggtcagcaatcttgggtttcctggaggtgggtggagggggtatcactggatgtgttcagagatgcagctggttcactatcaactttgtgtggacttttccctttttctttgaggctggatctcactctgtcacacaggctggtgtgcagtggcgtgatcacagctcactgcagcctccactccagcgatcctcccacctcagcctcctgagtagctgggaccacagttgtgcgccaccatgcctgggtaatttttgtatttttcatagagacagggattcaccatgttgcccaagctggtcttgaactgagctcaagcaatctgcctgcctgggcctctcaaagcattgggattacaggcgtgagccacaacgcccagccaggtgtttattttctcattatttatttattgtagagatgggggcctccctatgctgcttaggctggtcttcaggtcctgggtgatccttctgtcttggcctcccaaagtgctgggattacaggcatgagccatggcgcccggccttgtgtagatctttaaaaggtaccccttccatgctgggtgccgtggctcatgcctgtaatcccaatactttgaaaggctgaggtgggcagctcacctgaggtcaggagttcgagaccagcctggccaacatggtgaaacctcgtctctattaaaaatacaaaaattagctgggcgtggtggcgggcacctgtaatctcagctactcgggaggctgaggcaggagaattgctggaacctgggaggcagaggttgcagtgagccaagatcgcaccattgcactccagcccaggcaataacagtgagactccatctcaaaaaataaaataaaataaaataaaataaaataaaataaaataaaataaaataaaataaaataaaataaataaaaggtacctcttcctctgggcagatgcaatgtgtggtgaggggaacagacgacgtcagcttctgctctagcttctgtctggtatgcttgtgcagtgtgcaacttgcacaactgttcttggcagtactgctcctgtcccccatctcttgagtagctcagaaggtgaggggcgctgtgaagaccaagtaaccagaggctggacctctacacccaggtgtttagagggccaaaccccaacctctgtgcccagctcattgctggtgaaaaatctgccaaggaactggactgttctgggtgacaccccaaagactcccctcctggtatccccagcagtgtctcccttgctcctccagactaggggtgccctcgccttccccagccccctctgcacgtttccacccagccaggagtcccacacttgcctgcttctcccaaccttctctctctctctctccagcacagtggctatttttatttttccttcttattaaatttccaacttctgcaaacaccatggcccctgcctcgccgcgccccccccccttcccttagggcggatttgattcacttgcgttttattaacagattaaaaaaaaaaaacctgcagctgccaccacaatgtgactttctccgctttcctggaggtttagggaaccgaggagaactgggctacaggatctctctctgggtttaaattcgccctcctccccactcccagggacctttccatcatagcctgagcggcgaggtcgggaaggggctgcggaatgaggttggatgtcgttctgggtttaggggggaatgggatgggtgtcaggcctgatgcggttcccccagccagggcctcgtcccaaggcggaactggaaattaaaaaaaaaaaaaaaaaaaaaaggcaatccgttgggaagccccgcccccgcccccgcctcccccccccacagaccctgggtgctaaactcttcgggtgggaggggcagcctcgggggtgtgggcttagagttggcgcctcccacacagagctggggtcgcccctaccctctctcccttaggatggctggcagggggccttgggaaggtttgccgcctgcccaagcccggctcgctcagttttctttcctccttaggacattctgattccggtgctgactcccagacctgagagcaaattgctccttcatgccccggggtgttttcctccccccaagtctttttttttgtcagtcgccctggcaaccaggaacccagctgcactttacttccctgggatacagaatgggggtagggggtgatggggaaactaactgggtcgtttaggccaggaccttcctaccctcctctttgccccctcttagtcctccacccctccccacaccacctggtccagccttgattgacaagagggcaggttgcccctgtcagggttacccatctgggtggttgggccacagcttccttctgggtcactctgttctgggaaggtccttcatttggcccgagggctaaggttccagctgtcagtgaaatccctttccccttcctttcctccactctttagtccctcaatcagggtgggctggtacggttgggcaggttggacactgcacaaggggacactgagtgtgttcaaactaagctcccgatttccattgctcccttactccatagcacactacagactaacctctcctctgccttactgacaccaactctctgctatcaggagagccaatgatttcaataaaatacttcagtcctggtcacaccccaatgcagagctgaagaaaggaagtccagtcgggaatttggggtcttgaacaacccaagccacagctcctgtgggagcttagagagagagcaaacctgggcagaaagaacttctacagagggccgggcgcggtggctcatgcctgtaatccagcactttgggaggcagagacgggcggatcacgaggtcaggagatcgagaccatcctggctaacacagtgaaaccccgtctctactaaaaatacaaaaacttagccgggcgtggtggtgggcgcctgtagttccaggtgttcgggagacggaggcaggagaatggcgtgaacccgggaggaggagcttgcagtgagctgagatcgcgccactgcactccagcctgggtgacagagcgagactccatctcaaaaaaaaagaacttctacaggggccaaagctagggtcgaggaccatagaatgccctggggtacccagggaggggcagggaatgattatcaaaagccccaaagaaatcatggggctggtcaagtttgcttcacggacccaattctacagcccaccatctatactctttgcctaggtagctcctcccactgggaggtggagcctatttccacaccccttgaatctgggttggtctcgtgatctcctttggccaatcaatggattgcagcagaagtgaagtcacttcccaatctaggcctgaagaagtggtgcatgtttctgctcgatgtctggaaaccctgcccctgtcaggtgaccaagccctagctagcctgctggaggatgagggaagaatcctgttgtcctagaccagcctacagccagccgggccccaaatatacgaaaagacccagcctgaataaatacagtgtgcctcttggacccatagacgttggtgggtgagcccagccaggggcggaaaaactgctctgtagcctgcgaagccaaaattaatgctgattgtcctaaactgctggatttgagcgttgttaggcagctttttttttttttttttgactcagtctcactttgtggcccaggctggaatgtagtggtgcaatcttggctcactgcaacctctgcctcccggattcaagcgattctcctgcctcggcctcccgagtagctgggattacagacacccgccaccacgactaatttttgtatttttagtagagatgaggttttgccatgttggccaggttggtctcaaactcgtggcctcaagtgatccagctgcctggcctctcaaagtgctgggattacaggcatgaggcactgtgcctggccttgtgttagacagcttaactggcaacaggtaactgacaaggagcctggcaggcacaggtgtgcattggtcagcacgtccccttgcccacgaaggagctagactcaaatcccgaggtccccaaaattgattgtcaactctttaacttcctgaggaatccttccccatttttcctttatttgtttcttttttgtttgttttttggcatggccttccagtgaaattccccatttttcctttttctttcttttcttttttttttttttttggacggagtctcgctttgttgcccaggctggattgcagtggcgcgatctcggctcactgcagcctctgcctcccaggctcaagcgtttctcctgcctcagcctcccgaatagctgggattacatgtaccaccatgccccactaatttttgtatgtttaatagagacggtgttccaccgtgttggccaggctggtctctaactcctgacctcaggtgatctgcccgccttggcctcccaaagtgctgggattacaagcgtgagccaccgtgcccagccccccatgttttctttccttggtatctctctgattgcacctcctctcctctctctttcacttccgtccagccacatcagcctcctagctgatctcctctatgctagttcccaccccagagtcttggcacccgctgttcctcctgtctggaaccttcttcccccagatctctatgtgtatcctccgcttttactccttcaggtctctgttcatgtgcgtgatcctctgaggtgcccgccttaacttagatagatacacgtctccttccaggccctcaccaatctactactgctcccaatgggagccacatcatgtccagcctaggacgctaaagttgacccagggctcagatgggagcagaacagccctcccctaaaacattcctttttttttttcttttttcttttttctttttctttttttttttgagacagagtcttgttctgtcacccaggctggagtgcagtggcgcgatcttgactcgctgcaacccctgcctcccaggttccagcaattctcctgcctcggcctctcgagtagttggaattacaggcacctgccaccacagcaggctaatttttgtatttttagtagagatggggtttcaccatgttggccaggctagtctcgaactcttgacctcgggtgatccgcctgcctgagcctcccaaagtgctggaattacaggtgtgagccactgtgcccggccacacaaaaccattcctcatccacctttcccctaatgattttactatccatggctaatcatgtcctagatccatgatttctttctttctttcctttttttttttttttttaagagacggggttggggggggtctcattatgtttcccaggctgatctcgaactgctggcctgaagcgatcctcccaccttgccctcccaaagttctgggattacaggcgtgagccacggtgcccggcctagagccatgatttcattacaagttgcaaaatactgcattcccagtttatcatggcattttcccatttatacatctgtcgtctccaacaatctggaaagccctcaacagcagagtcagagccacagggtaccaaggaaacatttgctgaaagaatttgaattcaggagatggagcctattgggggaaaaaacccaaacaaacaggtatttgttgtttagggcaaagaaacatggcaccatttctcctgcttctaggatcaaaggctgttccactccaatctccgctggatgccaagcctggccaaaagtcccaggacatggcctggccccctacccgtcaacgctttccctcttgtgacaccccatggagtcaccctatggactcaggaccaatggggttttggggagaagacagatcgtctgtctacaggtatcaacattgctttccttctcaaaaatttttttattttaaacctccccacaattcaaatgtttctcttattatcttctgccgagggaaaaaaattaataacatggcacaatataaaatactaaattaaaggcattttggaaccagcaattatttcataagcttctcttttattgccacgctaatgtgcctaattgctatcttaatgaggacattaatttctggctaatgtgatgttattatagaaattgcagtcaatctcttaaaaggaggaaagtgccagaaagccgtcccacgaggcagaggctttggtcaccccggggctgaggggcaaaggggaggggaggagacggtgctggaacccgggccaagactgggggaaggatgcggctgctgggagccagagagggggaaggcaggggacttgtgctgggactaaaacctcccagggaggccctgatctgaaagccagctgttgccgtgcccggggatctaggagatgaaactgaataggggaaagtgttacagcaataataaaacctgacatcagtggcaggcacggttgaggcattttctatgctaatccttgcaatagctctataaaatagatagtgtcatttcccccattttatagacgggggaacagagaggttgagtaatttacccaaggtcacacagctattacatgatagagatgggatttgaacccagcccgtctggcttaactgctgagctatgctgcctttcagccagcaccctgaaaccatcgataataatttcaaacatttattgagggcttactatgcaccggctgtgagtcaagccttttgcacacagcatctctgggtgggctccatcttggagaaagaggtgcagctacagccacatctgagcactccttaatatacagggaggacgaggcaaggctcaaagctcgggggctggtgttgcacctccctccccacacaggaacaggaaatccattgtaggtagagagacttcagggcccagagaggagaaggttattccctctgagttgcaccttatcacaggttactgtggtggtcagggtaggttttgaaggcaaatggtctgggttagaattctagcttttcccatttggcgagtggccgaccctctctgcacctcaatttcctcatttaaagattggggctatgggaggccgaggtgggcagatcatttgaggtcaggaattcgaaatcaacctggccaacgtggtgaaaccctgtctctactaaaaatacaaaaaagaaaatgagccaatcatggtggcctgtgcctgttatcccagttactcaggaggcagaggcaggagaatcacttgaacccaggaggcgaaggttgcagtgagctgggatcgtgccactgcactccagcctgggcaacagagtgagactccatctaaataaataaataagactggggctaacaatggaacctacctccaagggctgttataagaattgagcaactggttgggcgtggtggctcgcacctataatcccagcactttgggaggctgagatgggaggattgcttgagcccaggagtttgagactggcctgggcaatatagcaagactccatctctacagaaaaaaatattaaaaattagccgggcatggtagcatgcacctgcagtcccagctacttgggaggctgagatgggaggatcgcctaagtccagaagtttgagaccagcctgggcaacatagcaagaccccatctctacataaacgtataacaagctgagcatggtggcgcccccatgtctgtagtcccagctactccagaggctaaggcgagaggatctgcactgcagcctgggggacagagcaagactccgtccctaaaaaatccaaaaacaaaataaaagacaaactgtgtattagaacaaggacacgccagctgctgtaacgagcaacctgtagatcccagtggcttaatgcactaaaggctactttctcactcacatcacgctgccgcacctgggaaccagacgccggctatattgtggcttcaccttcttccagtgactcagaggccccacaagaccctctttgtccagccagcagatgcaaaggaagaattagaaggtgcaggtgggaggtgttaaaagcctgaatgtagcacacctcacttccattcgcatcccacagaagcagataatgataaaggttaggaaataggtttggagtctgggaaacatggggagaccccatatttacaaagaagaaaacttttttaaaattatatggttaatggtggcgcaagcctgttgtcccagctactcaggaggccaaggtaggagtgaggtaggaggctggaagggactctggaggtgaagttcagacactggaccaaattgatggccagatgcggtggttcacacttgtaatcccagcactttgggaggccaaggtgggtggatcacctgaggtcaggagttcgagaccagcctggccaacatggtgaaaccccgtctctactaataatacaaagattagccgggtgtggtggcaggcgcctctaatcccagctactcgagaggctgaggcaggagaatcgcttgaacctgggaagcagaggttgcagtgagccgagatcatgccactgtactccagcctgggagacaagagtaaaactccgtctccaaaaacaaacaaagaactagctaaagcaggtgtgtgtaggtgtgtgtgtgtgtgtgtgtgtgtgtgtgtgtagcacctccccataagacacgcccaccagtgtgccatgtcggtttacgattaccatggcaacacctggaattccccgcccctttccatggcaactacccaaccacctggaagttaccactctcatcctagaaatttctacataaactgccccttaatttgcatataattaaaaatggatataaatatgagtgaatacagcagcacctctgagctgctactctgggcacactgccttttgggtagccctgattcttcactaaattttctgtttaacaccaccagctctcccttgaattcctttttgggtgaatctaagaaccctccagggctaagccctaatttttttttttttcttcagactgaatctcgctctgtagctcaggctgctggagtgtagtggttcgatctcagctcactgcaacctctgcctcctgggttcaagcaattctcctgcctcagcctccccgagtagctgggattacaggcacatgccatcaagcccagataatttttgtatttttagtagagatgggatattgccatgttggccaggctggtcttgaactcctgacctcaggtgatccacccaccatggcctcctgaggtgctgggatttcaggcattagccgctgcacctggcttttttttttttttttttttgagaaggggtcttcgacacccaggctggaatgcagaggtgcagtctcgactctctgcagcctcgacctctgggtgtcagatgatcctcccatttcaacctcccaagtagccaggagtacaggtctgtgccactacacccgcctaatttttgtaatttttgtagagatgggatcttgctatgttgcccaggctggtatcgaactcctgggtccaaatgatccacccgcctcgcatcccaaggtgctgggactacaggcatgagtcacccacccagcctaagccccaattttgggggcctgcttattcctgcatcaggaggagcactggaggccaggagtttgagaccccaacctgggaaacatattgagaccttatctctacaaaaaaagaaaaagaaaaaaattagctgggtgtggtggcacacacctgtgtcccagctactcaggaggctgaggtgggaggatcacttgagcccaggaggtcaaagctgcagtgagccatgatcatgccactgcactccagcttgggtgacagagtgagacccccacctctaaaaataaaaatagagcaaataggtctgggctggaggcagcccaagggtcccctggtttcatcactttccgtccatcttcccaaacgcatcaccttggcaagcacacagcaggcaggccagacagatgcgcccggtaaaaatacaagaagctaactgggcacggtggctcacacctataatcccagcactttgggaggctgaggtgggtggatcatgaggtcaggagttcgagactagcctggccaacatggtgaaaccccatctttactaaaaatacaaaaacacaaaaattagctgggcgtggtggtgtgtgcctctaatcccagctactcgggaggctgacacaggagaactggttgaacccaggaggcggaggttgtagtgagccgagatcgcaccactgcactcccagcctgggcgacagagtgagaccccatgtctacaaaaaataattctaaaaattagtcgtgtgtggtgtcgtgcaactgtagtcccaactactcagggggctgaggtgggaggatcacttgaacccaggagtttgaggctgcagtgagctgtgatcacaccagtgcactcctgcctgggcaacagagagagatctcatctctaaaaaaagaaaaaaggagccaggcacggtggctcacagctgaagtcccagcactttgggtggccgagctgggtggatcacctgaggtcaggagttcgagaccagcctggctacatggtgaaactccgtctctactaaaaatacaaaaaaaaagtagccaggtgtggtggcacatgcctgtagtcccagctactcaggaggctgaggcaggagaatggcatgaacccgggaggtggaggttgcagtgagctgagatcaagccactgcactccagcctgggcgacagagcaagactctgtcaagaaaaagaaagggaaaggaaaggaagggaaaggaaggggaggggagaggacaggaggggatgggagtggaggggaggggaggggagggggagagaaagaaaagaaagaaagaaaggaaagggaaggaagaaaagagagagacagaaggaaagcaaaagaaagagaaagaatagtaataaaagggaccaggtgtctgaaggctgagttgcagggtgccccattgctgaagaactgcttccagaatgcagctgtgtaagtctgccagtgtggccagtgtggctgggtgcaagctcttcagggtcccaggctacacacaagcgattttactttatttctaaaatggactaactcggtttgaaacttaacccaactcactcacaaaaggaatgttctctcatggccatgaatgcaaaaccaccacgagtggccacaaacaagtataaaatagacaaaatgaggcttggtgcagtagcccatgcctataatcccagcactcggggaggctgagggtggaggatcgcttgagctcaggagttcaagcccagccagggcaacatagcaaaaccccatctctacaaaaattagccgggcatggtggcatgtacctgtagtcccagctacttgagaggctgaggtgggaggatcacctgagcctaagagacagaggttgcagtgagctgagattgtgccaccacactccagcctgggtgacagagccgagactttgtctcaaaaaaaaaagaaatgaaaaataaaaataatgaaagtgcaaagagtatcatgacattctccctatactttgtcaagactgtaaggctgggaccagctcttttggctaaaaaaaaaaaaaaaaaaaaaaaaaattggattgggaagcatcggaggggcgtgaaaatcatgctagctagcacctctctaagaattgctttttttttttttttttttgagacagagtctcactctgtcacccaggctggagtgaaatagtgcaatctccttgcaaccttcactttctagattcaagcaattctcctgcctcagcctcgtaagtagctgagattacaggcatgtgccaccacgcctcactaattcttgtatttttagtagagggggtttcaccatgttggcgaaactggtcttaaacccctgacctcaggtgatccccctgcctcggcgtctcaaagtgctgggattacaggtgtgagccaccaggcccagcctgagacttgctttttttgagggattagagggattgatagttcagtaaaggaagtcactttctcactagtgattctgtggtactgaacccagggcctggtacccagggggcaagtgggcgagtggatgttccgggtcacccagccagccaggggaggagctgattctagatcttcccttatctctctgctgtttaaaccctttttgctccttccaatgggaaacagggaagggggaggctgtgggattggaacagaaagcgtcctggactccagaggccctgagcagccattcccctccctgggcctcagttttctcatctataaaatgggtagctgcagactagagagacaatttgtaaagttctgctgtgttagtcagggttctccagagaaacagaatccacaggcgtgagagaaacacacaaagagagagacagagagagacttatttgttttttagaggcagtgtctctttttctttttttcctttttttttttttttgagacggaatttcgctgtgtcacccaggctggagcgcaatggcgcgatctgggctcactgcaacctctgcctcgtgggttcaagcaattctcctgcttcagcctcccaagtagctgggattaaaggcacacgctaccatgcccaactaatttttgtatttttagtagagacagggtttcaccatgttggccaggctggtctcgaactcctgatctcaggtgatctgcctgcctcggcctcctaaagtggtggctcatgcctggccttcattttctttctaattttttttttaaattttaattagacaggatctccctctgtcacccatgctggagtgcagtggtgcaatcacagcgcactgcaacctccacctcctggcctcaagcaatcaatcctcccacctcatcctcccaaagtgttgggattacagacatgagccaccgcacctggtggatttcttttcttagaaaagcaatacatgctcatgataaaacgcaaggaattcaaaccctatcggagggggagcatattgaatggagtctctctctcagctcctcccttccccctaatatagctctgctaagagctgcccggtgtatccgccctggcattttctatttgcacaccagagtcgatacgaatatcctccttttactttcacaaatagggatcgttgcaggcacacagttccatgatagctttttccagttaattatatactgtggacaccttccccaaatcagcacatccagacctgcctcattctgcttaatgactgcagagtattggaagatgtgccttaagagagagggagagagaaaataaaaaatgatatgtttggaatgttccacctggtagtcccagatctgggttaatggaatgggagatcacactccagttcctccccatctcttctggcttgttttctgtttgtttgttttgttgttgttgttgttttttgaggtggagtttagctcttgtcgcccaggctggagtgcagtggcgtgataccggctcactgcaacctctgcctcctggattccagcgattctcctgcctcagccgcccgagtagctgggcctgtaggtgcaccaccacacccagctaatttttgtatttttagtagagatggggtttcaccacattggccagattggtcttgaactcttgaccttaggtaatctgcctgcctcggcttcccaaagtgctgacaggcgtgagccactgcgcccgacctcttctggcttttctatgtcttgggaaccaacacagttgtagtctctggccagctcgatttgagtgggacagacaggcttgtgtctgggtcagggtggaggtgccaagctcctgttccagccatcagcagtctgtggagaaaaaaaaaaaaagccaaactgaaccccagagccaagtgcatttcttgggacatagtttattgggactgggacctgctgtgaggctgtgcagacctcattgtcgagggcagctgccctgagagaacaggctaggaagatgcagcagggcaaatctatttccatcctgagtggtcacgtgcttcagcgggtcagccctggttggtccaaatccatctaatgctccattccctccctcgtaattgacttagggatggcccaccacctgtttttgtaaataaagttttattggcacacaattgtgctcatctgtttgcatgtcgtttggggcagctttcactcaaggacagaaccaaatacagatggtcccaacttaacgatggtttaactgacaatgtttcaactttacaatggtgtgaaagtgatacacatttggtagaaaccctacttcggggacccatacattgtgtttttcacgttcagtatagtattcaaagaattatgtgagatattcaacactttattttaaaataggctttgtgtttgatgattttgcccaaccgtgggctaatgttaagtgttctgagcatgtttaaggtaagttaggctaagctgtgatgttcactaggttaggtgtattccatgtattttcaacttgtgactctttcctttctcctttttcctttcctttaccttttcccttccttcctctctcctccccttccctccccttctcttttcttccttttgaaacagaattttgctccgtcacccaaggctagagtgcagtagttccatcacagctcactgcagacttgaactcccagctaaagcgatccttctacctcagcctcccaagtagctgggtctacaggcatgtgtcaccatacctggctaatttttaatttttttggtagagatggggtctcactatgttgcccaggctgataaactccagggcacaagtgatcctcccacttcagcgatgttttcagtttacagtgggtttattggaacatagttccattgtaagtcaaggaaaatcggtagttgcaacagagaatgtctggcttgcaaagctgaaagtacttactatctggtcctttacagaaagatgttgctgagccctgggctagtgtatactaacagcatgtgctacctacacctctctgcctgggggctttctcctggcccacatgtgggacaggtcagaagtgcccagggcacagccctcagtgtaggatgggtggtaactgtcaaatacctcagctttgtccgggtggtgcggtggcttacgcctgtaaaccccccactttgggaggccgaggtgggtggattacttgaggtcaggagttcaagaccagcctggccaacatggcgaaaccctgtctctactaaaaatacaaaaattagcagggcgtggtggtgggcacccgtaatcccagctactcgggagcctgaggcaggagaatggcttgaacccgggaggcagaggttgcagtgagctgacatcacaccactgcactccagcctgggcaacagagtgagactccgtctcaaacaaaacaaaacaaaacaaaacaaaacaaaaccccagctccctctccacttgggtgggatgtctccaaggtgcatgtgtcacacagttttcacagcaagccccagtgggattgggacccagcggctctcagcagtaactacttatttataccttgcatgggctgttctcatgttcctgtctcatttttcttctcccctatcagtgattcctggaatcactcagtcttagtctggtagggctaacaaaatatcacaaaacaacactaaatttcatgcagttctggaaactgggaagtccaagatcacggtgtcagccaattcagttcttggtgagggctcacttccttgcttgtgtacagccgccttctcaatgcatcctcctgtggcctttcctcagagtgcacacggggaaaaagagtgggctctgtgttgtctcttcttctaaggacaccaatcctattgaacaagggccccacccttatgacctcgattaaccttaattacctctatctaattacctaaaggctccatctctaaatacagccacactaggggttaggactttaacatgtgaatttggaggggcatgcacagttcagttccatcccagataaactgcttgcactcaaattcttactcctggatcgacttctgggaggcctcaaatcaagacaccacatgacagatttcaggttagggagaactgaaggcaagtaccaggaaggacttccttccttctagaaggcctcttcttcctctggaatctgctatttctgcatgtgatggctggagtcttggaagctgtcttgggaccatgaggagggaatacccttaggacaaagctgagatgctggggaaggtggactggacagacagaaagaacctggttgatggtatcatgaggccactgaattaaccgctagagcttccctaaccctgaatttattgttctgtgaaatggtgactattattattgtttatgttagcttgtgtagggattttcatcttcctttctgatagaggtgaggcctgaagtgggagggtggatgattaatccaatggagtaaagacaggtgctccttttttttcaaagagaagagattcgctcatacaactgaaaaatgtacacctttctggttaggggagattacagctggggttgcagcagacagaacatttttgttgttgttagcacataagagaatccttacctgccacaactaattaagaagagaagaggctgagcatggtggctcattcctgtaatcccagcactttcggaggctgaggcaggaggatcactggagcccaggagtttgagactagcctgagcaatatagcaagattctgtttctatcaaaagatctttttttaattagctgggcaatgtggagagcaactgtagtcttagatactcaggaggctgggaccagaggatcccttgaacccaaaagttcgaggctacagtgagctatgactgatgtcactgcccctccagcctggacaacagagcaagaccctgtctctgaaatttgtttttttgagacagagtctcggctcactgcaaattttgcctcctaggttcaagcgattctcagcctcccgagtagctgagattgcaggtatgtgccaccacacctggctaatttttgtatttttagtggagacagagtttcagcaggttgcccaggctggtctcaaattattagcctgaagtgatccacctgctgtggcctcccgaagtgatgggattacaggtgtaagccaccgcgcccagcctgaaaaaaaaaatttttttttaaagagaagagatttgctcacacaactgaaaaatgtaaagaagcagtatatcttcaggtgtggctggatccagatgctgagatcatgtcaccaggagtctgtttttgtccatctcttcatagatttgtttaatctagttgctgcctcagcagccatttttaggcctgacctaagttgtttgaagcacagttgtatcccatcacttttggcttagttaaaacttccccttcctggccgggcgccatggctcatgcctgaatcccagcactttaggaggccgagacgggcggatcacgaggtcaggagatcaagaccatcctggctaacacagtgaaatcctgtttctactaaaaatacaaaaaaaaattagccaggcgtggtggtgggcgcttatagtcccagctacacaggaggctgaggcaggagaatcacttgaacctgggagacggaggttgcagcgagccgagattgcgccactgcactccagcctgagagacagagcgagattctgtctcaaaaaaaacaaaaaccaaaaaaaccaaaaaaacaacttcctcttcctggtggggtgcaatggctcatgcttgaacccaggagatggaagttgcagtgagctgagatggcaccactgcacttcagcctggattacagtgtgagactctgtctcaaaaacaaacaaacaaaaacaaacacaaataaacaaaaccaaccaaccaaatggcaacaacaaaaacttccccttcttggctgggtgcagtggctcacgcctgtaatcccagcactttgggaggccgaggcgggcggatcacctgaggtcaggagtttgagaccagtctggccaacatggtgaaaccctgtctctactaaaaaatacaaaaaaattagccaggcatggtggcgggtgcctgtaatcccagctacttgggaggctgaggcaggagaatcacttgaacctgggaggtgtaagttgcagtgatccaagatggtgccattgcagtccagcctggacaacaagagcgaaactccatctaaaaacaaaaaacaaaaaaaacccaaaaaaaaccccaccaactttccctttctgtgtggttgtttgtgatgtagttcacttgttcctcatcctactaacccaaaacataacacatcccacaactgccaaccacagtgaaacctaatggccaacactagagctatataaataagttcccttttctttaaactagttttatttaaacaagtccatccgcaacccccatgggacaatatgttgcccaggcttgtctcacgattctcccatcccagcctcccaaagtgttggaattacaggcatgagccacagtgccaggccgctgtttgtattcattacgtttttttattttctgaattttatgatgctttgacatttggaggcttactgatcctggagagactgctcctcccagggctagctaattcctagagatagcaaacaacacagctgtgagcgtatgtttaatatacaaaccaagcagtccagagcccaacccccaactatctcctttatcaaactctgacacaccaagacaatattcctcctgcctaaatcaccccagagtcaggtatggacaactagagatcaccccataactcagagactgccaaaattatttgaaccatcaaaccttcttttttttttttttgagatggagtttcgctcttgttgtccaggctggagtgcaatggcgcgatctcggctcaccgcaacctccgcctcctgagttcaagtgattctcctgcctcagcctcccaagtagctgggattacaggtgcctgccaccacgcccggctaattttttgtatttttagtagagacggggtttcatcatattggctaggctggtctggaactcctgacctcaggtgatccaccttccttggcctcccaaagtgctgggattacaggcgtgagccaccgcgtccggccgaatcttcatttttatttatatttttttgagacagagtcttgttctgttgcccaggctggagtagagtggtgtgacctcaactcacttcaactccacctcctaggttcaagtggttctcctgcctcagcctcccaagtagttgggattacaggcacacaccactatgcctggctaatttttgtatttttagtagagacgaggtttcaccatgttggtcaggctggtctcaaactcctgacctcaagcgatccatccgcctcggcctcccaaagtgctgggattacaggtgtgagccaccgggccccgccatatttaaattttttttgaggctgggtgtggtggctcacacctgtaatcctagcacttttggaagccgagggaggaggatcccttgagcccaggagtttgagaccagcctgggcaacatagcaagaccccatttctacaaaaaataaaaataattagctgggtgtggtgtgtggtggcgtgtacctgtggtcccagctactcaggaggctgaggcaggaggatcacttgagcccaggaggttgaggctacagtgagctatgattgcaccactgcactccagctatgcttgcctcactgcactccagcctgggtgacagaacaagattctgtctctaaaattaaacaaacaaaaaaaagtgaataggatcatcttggctgtagaggggaggagagaatttagagaggctggagcgggggacaggagtgtgatatgattagaaataggagttggagccaggcgcggtggctcacgcctgtaatcctagcactttgggatgccgaggcgggcggatcacgaggtcaggagatggagaccatcccggctaacacggtgagactccgtctctactaaaaatacaaaaaattagccgggtgtggtggtgggcgcctgtagtcccagctacatgggaggctgaggcaggagaatcacttgaacctgggagacggaggctgcagtgagctgagattgcgccactgcactccagcctgagagacagagcgagagtctgtctcaaaaaaaaaaaaaaaagaaaaaagaatgtctccccaaggagcctggcgtgttggtgcgctcctataatcccagctacttgggaagatctcttgagcccaggagttcgagaccagcctgggcaacagagcaagaccccaactgaagaaagaaagaaagtcccccagagaccagagcttcctggggattgggaggccgtgtaatgggctatattatggggcccattggtggctcacttctccgtctagcccagaaattgtcacccgggatgattctgtctcccatggggaccatctagagacgtacttagtggtcacaactggaggcggggattgttactggcatctcggggtggaggccggggatcctacgatagctcccaaaacagacagtgaatggtctggttccaaatttccctagtgcctaggctctgcctcggacaggagccgcagccggggtgggggcaggggtgccaggacatcagaaacatcttatttatttatttgtttactttttatttgtttgtttactttttatttatttatttatttatttattggagacagagtcttgctctgtcgtccaggctggagtgcagtggcacgatcttggctcactgcaagctctgcctcctgggttcaagccattctcctgcctcagcctcccgagtagctgggactgcaggcgcccaccactatgcctggctaattttttttttttgtatttttagtagagacggggtttcactgtgttagccaggatggtctcgatctcctgaccttgtgatccgcccatcttggcctcccaaagtgctgggattacaggcgtgagccaccgcgcccagctacttatttttttgagacggagtctcactctgtcacccaggctggagtgcagtggtacgatctcggctcactgcaacctcctcctcccagttcaagccattctccttcctcagcctcccgagtagctgggattacaggcgcacaccaccgcacccagctaatttttgtatttttagtagagatggggtttcagcatgttggccaggctggtctcgaactcccagcctcaggtgatctgcccaccttggcctcccaaagtgctgggattacaggcgtgagccaccgcaccctgccagaaacattttaaagctccccagggtgactttcaggtgcagccaggcttgggaaccgccagtgcagagggtcagagggttctcccgtccggtcccctgctgcaccacccggaacctctctctcggttccccctctactgggtgtctgtggacagagagggtgggaagatctgctggtggaaacagcctcagcctctgagccccctagccccaggcccaggttctcctgcggatccctggcctggtgacctggcttgcgctgggggatcccagtgacctccttcgggcccgcagaggtctcctgaggctgctcaggacttcctctccctcagcctctttgccctggctagggagagagacaggaatggggccaacaaagggaataagaattctggagggggccgggcatggtggctcacgcctgtaatcccagcgctttggggagctagggcaggtagatcacctgaggtcaggagttcgagaccagtctggccaacatggtgaaaccccgtctctactaaaaatacaaaaattagccaggcatggtggcaggtacctgtaatcccagctgctcaggaggctgaggcaagagaatcgcttgaacccacgaggtggaggttgcagtgagccgagatggcgccgctgcctgagtgacagagcaagactctgcctcaaaaaaaaaaaaaaaaaaaaaagggaatttgggaggggagagaagtaaccctggtgtgaagtgtgaaaggagagaacttagggcaggaggagcagggtggaagagaacggcggccaggcctggagcacacgtgcattctcagcaaacaggggccctgtccccaggacatacactcacactcaacactcacacttatgctctgtcacactcacacagtcacacgcatgctcatacatggtctcacacactcatcctcacacagccccacagccttgcacactcccacccaccctcacacagccccacagcctcgcacactcccacccaccctcacacagccccacagcctcgcacactcccacccaccctcacacagccccacagccttgcacactcacacgcatcctcacagccccccagcctcacacactcccacccaccctcacacagccccacagcctcacacacatccatcttcacaagtctcatacccttcacatcacacacattgttgcacaaatgcagactcacacattcacacaggaacacacaaccacatgctcacacctataggcactcacactcacagtctcacagtctcacacattctcacacacatgcgtacacacacacattctgcaaacacccgtggcctcctctgccttcgccccctcccaaagctgcctgaagactctccagatgtcacctactgctgctgctgtggcctgagcaggaggggagtgcagaaggggaggctgggtgggaggggagcaggggcccgaagatgccccaaatccctctgcttcatgactagccccatttagagagaggatcaccctttgaaaaccagaacccctcaacgccagcaccccctgggtctccgggatgaggaggaccaggaaaaccctcccagacaaaggaatggctccaagcctggagtgatgagggtgcctgagattctttgctttttgttcattcattgattcatcttgcatgttattattattttgagacagagtctcactctgtcacctaggctgcaatgcagtgacaccatctcggctcactgcaacctctgcctcccgagttcaagcgattcccctgcctcagcctccctggtagccgggaccacaggtgtgcgccaccacacccagctaatttttgtatttttagtagaaacggggtttcaccatattggtcaggctgttctcccactcctgacctcaggtaatctgcctgcttcagcctcccaaagtgctgggattacacgcatgagccactgtgtcaggcctgatttttttttttttttttttgatggagtctagctctgttgccaggctggagtgcagtggcacaatctcagctcactgcaacctccacttcccagattcaagcaattctgcctcagcctcccgagtagctaggattacaggcacgcactgccatgccaagcgaatttttgtatttttagtagagacggggtttcaccatgttggcctggatggtctcgatctcctgacctaggatctgcccgactcggcatcccaaagtgcagggattacaggcgtaagccaccgtaatttttgtatttttagtagagacggggtttcgccatgatggccaggctggtctcgaactcctgacctccagtgatccacccgcctcagcctctcaaagtgctgggattacaggcgtgaaccactgcaaccggctcatcttgtatattagatccagcggtttctgtgtgtcccactctgtccacgccactgggggcaccacagcacccaagacagaaatccccacctacatggggctgatgtccagtggagagtcagacataaacaaaagtatggatgtgcatgtgtgacagagagaagcctcaacaagggatataaagggggaaaaaaagagctgagcccagtggctcatgactgcaatctcaacactttgggaagccgaggcaggaggattcgctggagcccaggagttcaagacaaatctgggcaacatagcaagaccccatctctacacaaaatttaaaaaattaaattgggccgggcgcagtgactcacacctgtaatcccaacactttggtaggctgaggtgggcggatcatttgtgggtcaggagtttgagaccagcctggccaacatggtaaaatgctgtttttactaaaaatacagaaattagctgggcgtggtggtgcacacctgtaatcccagctactcaagaggctgaggcaggagagttgcttgaacccagctgggcgtgatggctcacacctgtaatcccagcacttcaggaggccgaggtgggcggattacctgagatcaggagttcgagcacagcctgaccaacatggtgaaaccccgtctctaccaaaaatacaaaattagtcgggcatggaggcgcatgcctgtaattccagctacttgggaggctgaggcaggagaattgcttgaacccgggaggctgaggttgcagtgagccgagttcgcaccactgcactccagcctgggcaatatgagcaaaactctgtctcagaaaaaaaaaaaagaattgcttgaactcaggagatagaggttgcagtgagccaagattgcaccactgcactccaactgggtgacagagtgagactccatctctgaaaacaaaataaaataaaaataacaaagaaaaccagctgggcatgttggcataaccgtagtcccacctacttgggaggctaaagcgggaggattgtttaaactcaggagttgcaggctacaatgaactaagatcgcgccactgcactccagcctgggtgacagagagaaactctgtcccaaaataaattaaattaaatttgccaggcgcagtggctcacgcctgtaatcccagcactttgggaggctgaggtgagcagattgcctgaggtcaggtgttagagaccagcctggccaacatggtgaaaactcgtctctactaaaagtacaaaaattagccaggcatggtggcgggcacctgtaatcgcacctactcaggaggctgaggcaggagaattggcttgaacctgggaggcagaggttgcagtgagccaagatcgagccactgcactccagcctgggtgacaagagcaagactctgtctcaaaaaaaaaaaaaaattaaattaaattaaaacccaaaaacagtggagtctgggcctctcaggctgggtgcaccccaggggacttcctctctgatagtctccttgccctctacacctaacctggcctctacacctgggacccctgttccctgaggccccacccataaccacatccacgtctggtgggatccagcacctaagtccgctctagtggacggcactccttccccgagtccccactggcgaggaccatgagcaattcaatcccattctccacccagagactttgctggaaaagagctaattatatctctgccccggagcccatctggtggggtctgggtggtgacgggcgagtgtgttccgcgtccacggccggcggcacgcgcacaaacacagcttcccatatatttttaattccacagccatactttgattagagagccgatgtgttgtgtacgacctcagggacctcattatttttctaactcaaataaatacggcgttcagaattcggggagggttggagggggtgtggagtaaaagacgcagaaaactccatctataaaaagaattcaggccttaatgagcttttaaaacttgccaacctctctcccaccccctgacaccaatctataaacaggagccatgcctgctggctttgatggtgggagtctaggtgggtgaggattggctggggtgggtgttgcggggcaaagccacagcaggggagaggcccccctgcaaaggtagctgggtgtctgtaagatttggggaagggggatggcaggcacagtggctcatgcctataatcccagcactttgggaggctgaggcaggaggatcgcttgaggccagaagttggagatcagcctgagaaagatagcaagaccctatctctacaaaaaaatttaaaaattagcctggcgtggtagcgtgtgcctgtagtcccagctactctggaggctgaggtaggaggatggcttgaaccctggagtttgaggctgtagtgagcttagattgtgcctctgcactccagcctgggtgatacagcaagaccctgtctctggggaaaaaaaaaaaaaaaaaaaaaatatatatatatatatatatatatatatatatacacacacacacacacacacacacaccatacatatatataaaaacataaatatatacatatatacatatatagacatatacatatatagacatatacatatatacacatatacatatatacatatacatatacacacatatacatatatacatatatatgtgtatacatacacatatatacacacacatatatatacatatatatatatatatacacatatatatatatacacacacacatatatatatatatatatttgggcaagtgtgttcccagccacagggagaatggaagtggtctctatccaagttcagcaggaatcgtcaatattcatgggcccaggctaactggggtgttgatctgagaaagatttagaatttcctgatctcctagacccatttgggctgtggtatgaggatgagttctgcttcattattattatttttgagacagagtttcgctcttattgcccaggctggagtgcagtggcacaatctccactcaccacaacctccacctcccgggttcaagcaattctcctgcctcagtctcccaagtagctgggattacaggcgcgtgccaccacacctggctaatttttgtatttttagtggagtcagggtttcaccatgttggccaggctggtcttgaacccctgacctcaggtgatctgcccgcctcggcctcccaaagtgctgggattacaggcgtgagccactgcacccggcctctgcctcattcttgtatgtctggaaattcttccccagaggctcccctgggagttgctgagatgagcagatggggaaactgaggcagagcaaagcaggctggaccacaggatatgtattgggtgccctccccacccacttggagtcagctagaccccaccttccttcgcagtggataagccctggctggggttgggggttccccgttgagcaggcaccagccgaaggaggccccccagtggccgtggtgttacggtgaggtggacggagagcaggcagtgaccacggggctcccgaaaggacagggtgaccttcgagtcactacccatgtgcatcgttccaacagcagcaaagacactcccggagcaggcagcaaagccaatttcaggtgaaagatgagttaagtgggcagaaatgagctccgggctgagaaatttctgcatgacaaaaattccagggagcaggacagaccttaggagcagctgagcaagagcctctggaaggactcagggggataggaggggagggaagggatgaaaaacaagatcgggacatgcaataatgtggtgaatgggggcaggaagggggcaggaagatactggggtctgcacaatgcggggagaggggttttccctgcccctcaatctgaaatggcagcccctgtctcttgcttttccccctaccctctccctgctgttgttttctatttatttatttatttatttttgagacagagtttcactcttcttccccaggctgaagtgcaatggcgcaatcttggctcacctcaacctttgcctcctgggttcaagcgattctcctgcctcagcccccagagtagctgggattacaggcacacgccaccacacccggctaattttgtatttttagtagagtcagggtttctccatgttggtaagtctggtcttgaactcccgacctcaggtgatctgccagtctcggcctcccaaaatgctgggattacaggtgtgagccaccgtgcctggctgttttctttatttctttgattttagagacaggatctcactctgctgcccaggctggagtgcagtggtgcaatcatagttcactgcagcctccaactcctggtctcaatccatcctcctgcctcagcctcccaagtagctgggactacaagtgtgcaccaccacgctcagctaatcttttaatttttgtagagatggggtctccctatgttgcccaggctggtctcaaactcctgggctcaagcgatcctcctgcctcggcctcccaaagtgctgggattacgggtgtcagccactgtgcccagcttctgctatagttttctgtttgagatttcttcatcaccctctgtcatgatgtttgtcatccgcctctctcatcagactggccacctaccttgccccacctgaaggcagagagtttcgtctgtcttcctgaaaggtaggcagaaagatgtcagctgggaggggccttctagatgggtgtaaacagtggtgtgcttgtgaacctgttgtggggagagaagaggatttgtagtgtttgccaattccagcggtgtaaattctgccaccttggctgacttcaagctgtgaatgtaagatttccttgacagggtgggggaagtttgagggggcaaggggattgtgaggtggtgtccagatgggtgtaatcaatgatgagccggtaagccagctgcagagaggagacccaatttgtagtgtttgccaatttccatggtgtaaattcttcccccttggctgaattcaagctatgagtgtgatgccactgaatcccaacttaggaagagattgcataatgaaatgactcttgtgagccactttgacccagctcaagtataccgtggggtggaatctcctggcctggagttgaccctttctccagtttgggattaggaggaagggaagacaagtaagagggtgaagccagtctccctgtcttccttccatcctggggccattctactccctgggacctctgctggggatgctcttccatcagatactgataactgagctgtccccacccattctgcatagaccccatccagggcccctgctgggaaaccaagagtttgtccaagtggcgacatggggacccctacccactgctatctttgctgcctctttttttttgagacagagttttgctcttgttgccaaagctgcagtgcagtgatgcgatctcggctcactgcaacctccgcctcccaggttcaagtgattctcctgcctcagcctcccgagtagctgggattacaggcgcgcgccaccacacctggctaatttttgcatttttagtacgaatggggtttcaccatgttggccaggctggtctcgaactcctgatctcaggtgatccgcctgtcttggcctcccaaagtgctgggattacaggtgtgagccaccatgctcagttgccttttttttttttcctttttcttttttttttttagggacggggtcttgctgtcacccaggttggagtgtagtagtgtgatcatagcacactccagcctcacactcctggactcaagggatcctcccgccttagactctggagtaactgagactactggcacgctccaccatagccggctaagttttttagtttttgtagagaaagggtcttgcattgttacccaggctggtctcaacctcctggcacaaacgatcctcccacctcaccctctcaagtagctgagactacaggcatacactaccacacccggcttttatggatttttaaaactgattcataatagaggtacatattttcagggtacgtgatattttgatacattcatatcatgtgtagagatcaaatcagggtaattgcagtatccatcatcttaaaggtttatcttttctttatgctaggaatgctcaaaatagctctcctaccttttttttttttttttttttcgagacagagctttgctcttgctgcccagtctggagtgcaatggtgcgatctcagctcactgcaacctccacctcccgggttccagccattctcctgcctcagcctcccgagtagttgggattacaggcaagcatcaccacgcctggctaatttttgtatttttagtagagacagggtttcaccatgttggccaggctggtctcgaactcctgacctcaggtgatccgactgcctttgcctcccaaagcgctgggattacaggcatgagccaccatgtctggcctctcctagctattttgaaatgtataatggattactgtttactgtagtcaccctactgatctatcaaacactaagtcttgtgtgctcaagagcagtgtgagcacccagctcagctgtctgagcttggccctgtcactttccctcctggagcctcagttttcccttctgtgaaatgggtatatattagtgcctgcctctaatacagtgttgtgaggcttcaggaagggagtatttggttcctgtacctctagagcaggggtttctttcctctcttttcctttctctcttttgctctctcttttttttttttaaacagagtctcgctctgtcacccaggctggagtgcagtggcatgatctcagctcactgcaacctctgcgtcccgggttcaagtggttctcctacctcagcctcccgagtagctgggattacaggcatgtaccaccacacctggttaatttttgtatttttagcagagacgggatttcaccatgttagccaggctgatcttgaactcctgacctcaggtgatccactcgtcttggcatcccaaagggctgtgattacagttgtgagccaccaaacctgacccttcctctctccttccttccttcctttcctctcctccttccctccttcctttatttctctcttttttttctttctctttctttctttctttctttctttctctctttctttctttcttttttctttccttctttctttctatttttctttctttctctctgtctctctctcctttctttctttcttctttcggtcttgctctatcacccaggctggagtgcaatggtgcaatcagagctcactgcagccccaaactcctgggctcatgctatcttcccacttcagcctctggagtagctaggactacagatgcacgccaccaggcctggctaatttttttttttttttttttttttagagacagagtcttgctatgttgcccaggctggagtttcttgacctgagcactgctgacatttggggctgggccattctttgttggggggtcctgtcctgtgcattggtggatgtttagcaggatcccaagtcgcaacaaccctaaatgtctccagactgcagggacgcaggcaaccacacagggaggaagcggagagtcaatgctccccacctctctcctctgccttctaaccttcttttgaggctttctattggctgaacctaactgaagccagaggacaagggagctattaatgggttctttgtttgtttgtttgcttttgagacagagtctcactctgtctcccaagctggagtgcaatggcatcatctcggctcaccgcaacctccgcctcctgggttcaagccattcttctgcctcagcctccagagtagctgggattacaggcatgggccaccactcctggctaattttcaggttttgttgttgttgttgtttgtttgtttgagacagagttttactctgtcacctaggttggagtgaagtggtgcgatctcagctcactgcaacctctgcccccagggttcaagtcattctcctgcctcagcctcccgagtaactaggattacaggcatgtgccaccacgcccggctaatttttgtatttttagtagagctgggatttctccatgttggccaggctggtctcaaactcctgacctcaagtgatccacctgcctcagcctctcaaagtgctgggattacaggcgtgaggcactgtgcctggcaatgggttcttacatatcagcctcctaggcatggaacagggcggaagaagatgaagagtggcccatatcccaaagatacaccgctcagttttccttattcccctctgcatgcaaagacttcagacttccatcactgtctgaaggctgtcccgatcagctcctgccccactgcccctctgtcactcacgggtgtctcccccgtgaatctcttgtactttcttttttttttttttttttttgagacggagtcttgctgtgtcgcccaggctggagtgcagcggcgcgatcttggctcactgcaagctccacctcctgggttcacgccattctcctgcctcagcctcccgagtagctgggactacaggcgtccgccaccacgcccggctaatttttttgtatttttagtagagatggggtttcaccgtgttagccaggatggtctcgatctcctgacctcgtgatctgcccgcctcagcctcccaaagtgctgggattacaggcgtgagccacggtgcctggccgaatctcttgtactttcaactccatctcagcatcagcttctcagaggacctgaactgatgcaaggggcacgtcttcgtcagcttggactgtgtattagtcaaggctcgccagagaaacagaaccaataggatatatatagatacagagaaggagatctattatgagagattgactcatgtacttatggaggctgagaagtcctacaatctgccatctgcaagctggagactcaggaaagctggtggtgtgattccagcccaaactcaaaggcctgcacaccaggagagcagatggggtaagtcccgggtccgagaccaaaggcctgagaaccaggattgccagtatctgaggacagaagaaaacggatgtcccagctggagcagagagaatgaatttaaccttcctctgccttttggttctagccatgtcctcaatggattggatgatgcccacctacattagggagggtggatcttctttcctcagtctactaattcaaacactaatctcttccagaaagcctcacagacacaggcagaaatcatgtttcaccaggtctctgggtaccccttagttaagttgataacgcagaataaacatcacaggctgccataagaaaatacgataaattggctgggcgcagtagctcacacctgtaatcctagcactttgggaggccgaggcaggtggatcacctgaggtcaggagttcgagaccagcatggccaacatggtgaaaccccgtctctgctaaaaatacaaaaattagccgggcatggtgttgggcacctgtaatcccagctacctgggaggctgaggcaggagaattgcttgaacccaggacgtggaggttgtagtgagccgagatcatgccactgcactccagtctgggcaagagagcaagactttgtctcaaaaatgacaacaacaaagaaaataccatagactgagtggcttaaacaacagaaatttccttctcacatttatagaggctggaagtccaacagcaaggtgtcagcagagttggttcctggtgaggactctcttcttggcttgcagatggccgccttcttgctgtgtcctcacatggcctttcctctgtgtgcttgaagagagagagagatctctggcatctcttcctttccttataaggacaccagttttattggattaaggcctcaccctgatgaccccatgtaactttcattacctctttaaaggccctatgtccaaatatagtcacattgggggttaggacctcaccattttaatttggaggggcacaattcagtccataatgggacaaatgaaaaacattcagcacacagccagcctgcaagctccccagttacatatagactcacagacctttcatgaatagtggctggatcccctcattactttgtagttcaacgacaggaggactggagtgggggtctgctgggctgcatgcagtggctagtatatgtatggatggggtgtttgggatggatgtcagaagccccccaaaggtgtaattgatgcaggacagtgttccagagctgaagatcatcccccacccccatgacatgggttcccagcccccctgcccatcaaggttgtccagaggcagctgcataaggaacaagaaagccccagcgggtggtgcaccagcccagttctccacctctccaagtccaagctgagcagacatgggtgactgctttctggttctatatttggtcaggaggaggatttcctgtccttgaaaaaattcctgagatcctgggaagatgtgaaagccatggcaatttgaggggggcagggaggggaaggaattgtatgcagacagttcagctcaaatgagaggaggacaactaggaccccaagttgcaaagtctggctgcaaaaccagaagcttgtgatggagccccacaccccagggagacaggagagcatggtaggtgtatatttaaattaaatccagcagtccaggcacggtgactcacacctataatctgggcactttgggaggcaaggcgggcagatcacttgagttcaggagttcaagaccagcctggccaacaaaaggaaaccccatctctaataaaaatagaaaaattagccagatgtggtggtgcacacctgtaatcccagctacttggaagactgaggcaggagaatcacttgaacccgggaggcagagtctgcagtgagccgagatcgcaccactgcactccagccagagtgagactccatgttaaaaaaaaaaaactgctgagcaaggtggctcaaacctgtaatcccagcactttgggaggcagaagcgggcagatcacttgaggtcaggagttcgagaccagcctgggcaacatggtgaaacccccgtctccaaaattagctgagcatggcagtgcgcttctgtagtcccagctactcaggaggctggggcaggagaattgattgaacccagaaggtggaggttgcagtgagccgagatcacgccactgcactccagcctgggcatcacaacgagaccccgtctcaaaaaaaaaacaaaatccagtaaacagttcagacatggtggctcatgcctgtagtctcaacactttgggaggccaaggcagtagggttgcttgaggccaggagttcaagaccagcctgggtaacatagtgagaactcgtctctacaaaaaatttaaaaatcgctgggcgcggtggctcacgcctgtaatcccagcactttgggaggctgaggcaggcagatcacgaggtcaggatatcgagaccatcctggctaacacagtgaaaccctgtctgtactaaaaatacaaaaaaattagctgggcgtggtgacaggtgcctatagtcccagcttgtcaggaggctgaggcagaagaatggtgtgaacccgagaggcggagcttgcagggagccgagattgcgtcactggccactgcactccagcctgggcaacagagcaagactctgtctaaagaaaaaaaaaatgtaaaaatttagccaggtgtgttggcagatgtctgttgccccagctgattatgtgagtttgagactggaggatggcttgaacccaggaggttgaggctgcagtgaactatgatcacaccattgtactgcagcatgggcgacaaaatgagaccctgtctcaatcaatcaatcaatcaatcaataaaatagaaattgccctttaagctaggcacagtggctcacatctgtaatctcagcactttgggaggccaaggtgggaggactgctcgagctcaggagatcaaggctgcagtgagctatgattgtgtcactgcagtccagcttgggcagcagagcaagaccccaactcaaaaaataaaaattaaaattaattcattaaattcagtaaacaaaacagacaaagtcccttgtcctcacagagacaacattccagtgggggaaggcgacaatgagttagttaaataaaataagtggtaggttcaacaaggaaaataaagtaaagaaaaaaataggctgggcccagtggctcatgcttgtaatcccagcactttgggaggccgaggcgggcagatcacaaggtcaagagattgagaccatcctggtcaacatggtgaaactctgtctctactaaaaatacaaaaaaaattagccaggcgtggtggcatgcacctgtagtcctagctacctgggaggctgaggcaggagaattgcttgaacctgggaggcagaggctacagtgagctgagattgcaccattgcactccagcctgggcaacagagtaagactccatctcaaaaaaggaaaaaaaaaaaaaaaaaaaaagcaagggagacaaacaggaagtgctgaggatcggggttgcaattttaattgggtgtccagggaaggcctcactgggaaggtgactcctttttttttttttttttttttttttgagacagtctcgctctgttgcccaggctggaatgcagtggcccaatctcagctcactgcagcctctgcctcctgtgttcaagcgattctcctgcatcagcctcctgagtagctgggactacaggcacgcgcctccatgcctggataatcttttgtatttttagtagagacagggtttcaccacgttggccaggctggtcttgaactcctgacctcgagcgatctgcctgcctcggccacccaaagtgctgggattacgggcatgagtcactgcgcctggcctgaaggtgactcttgagcaaagagttgaaggaggtgagggagttgtattagtcagttatggctgcctaacaaattgccccacccccaaaatctcagcaacatggattatctcacagtgtctgtgggtcagaaatctggatgtggcttagggccactcacaagtctgtagtcaaggcatctgctgggctatagccttcccaaggttcaactgggaaggacccacttccaagctcacacatgtggctgttgtcagaattcagttccccactggctgttggctgaaggctagtctcagttccttgacacgtgggtctctccaaagagcatctgagaacatgggcactgacttcatcagagcaagccagccagtgggcaagacagagtgctgacaagaaggagggaattcagcaggacagacatcatggttttgttttgttttgtttgagatggagtctcactctgttgcccaggctggagtgcagtggcgcgatctcagcccactgcatcctctgccttctgggttcaagcgattctcatgcctgagcctccccagtaggtgggactacaggcaccaacacacccggctaatttttgtgtttttagtacagacggggtttcaccatgttggccaggctggtctcgaactcctgacctcaagcgatctgcctgcctcagcctcccaaagtgctggcattacaggcatgagccaccatgcccggcccagacatcacggtcttttataacctaatcttagaagtgacatccatcatttttgccatgttctttggttagaaaggagcccctcggctgggcgcgatggctcatgcctgtaatcccagccctttgggagaccgagatgggtggatcacctgaggtcaggagttggagaccagcctggccaacctagtgaaacttcatttctactaaaaatacaaatattagctgagcgtggtggctcaagcctgtagtctcagctactcgggaggctgaggcaggagaatcacttgaacccgggaggctgaggttgcagtgagctgagatcacgccgctgcactccagcctgggtgacagagtgagactctgtctcaaaaaaagaaaaaaaagaaatgagttgctagatccagcccacactcaaggggaggggattagacaaaggcctgaaggccaggaggcagggacccttggaggctgtcttagatactgcctcccacagcaaccatcagggggaacagcattccaggcagaaggaacggcaagtgcaaaagccttgaagcaggaacaagcgaagccatgtggtcaggacaagagggagtgcagtgtggctggagcaggaatttgggggcgggagagttagaacatgaagacagagaggccagcagtggtcctggggaccctatgagaagtaactttctgaattttttctaagaaccatgagaaaccacagtgcaatttcaagccaacacatgatgtcatctgatttaagattcctacgatacctactgaagtaatatggtatctggtatttgatttaagaaatctctttttttttttgagatggggtatcgctctgtcacccaggctggagtacagtggcacgatcttggctcactacaacctccgcctcccaggtacaagcatttctcccacgtcagcctccaagtagctgggatgacaggggtgcaccaccacacccagctaatttttgcatttttaatagagacggggtttcaccatgttggccaggctggtctcgaactcctgacgtcaggtcatccacctgtctcggcctgccaaagtgctgggattacaggtgtgagccgccacaccccactgaaagctcattattctaaaagttgggtgagcagggcacagtggctcacgcttgtaatctcagcaccgaggtgggaggatggcttgaggccaggagttggagaccagcttgggaaacatagtgagaccccatctttacaaaaataaaaaattaacacacctgtaatcccagctgaggcgggtggatcacgtgaggtcaggagttcgagaccagcctggccaatgtggtaaaaccccgtatctactaaaaatacaaaaattagcccagcatggtggcacactcctgtcatcccagctactcaggaggctgaggcaggagactcatgtaaacctgagaggtggaggttgtaatgaaccgagatcaccaccactgcactccagcctgggcgacaaagagactccatctcaaaaaaaaaaaaaaaaaaaaaaaaggccaggtgcggtggctcatgcctgtaatcccagcactttgggagaccgaggcgggcagatcacgaggtcaaaagagcaagaccatcctggccaagatggtgaaaccctgtctctactaaaaatacaaaaaattagccgggcgtggtggcgcatgtctgtaatcccagctactcgggaggctgaggcagaatagcttgctcatctgctgctggtttgcatgtgaaatggcacaaccactttggaaaacaatttttatttttatttatttatttttaagacggaatcttgctctgttgcccaggctggagtgcagtagcacaatatccgctcactgccacctccgcttcccaggttcaagcgattctcttgcctcagcctctggagtagctgggactacaggcacgaaccaccacgcccagctaattttttgtatttttagcagagacggggtttcaccatgttagccaagatggtctagatctcctgacctcatgatctgcctgcctcagcctcccaaagtgctgggattacaggcgtgagccaccgcgcctagccgggaaacagtttttaaaataaagttacattgggaggccaaggcaggcagattgcctgaggtcaggagttcgagaccaatctggccaacatggtgaaacctcgtctctactaaatatacaaaagaaattagccgggtgtggtggtgggcacctgtaattccagctactcatgaggctgaggcaggggaatcgcttgaaccagggaagtgggggttgcagtgagccaagatcatgccactgcaggccagcctgggtgacagagtgagactccatctcaaaaaatatataaaataattaattttaaaaaataaagttagacttaccattcatcccagcaattccattgctatacatttacccaagagaaaagaaagaatatatccatataaagacttgttggcaaatgttcatagcagatttgttcaattattgctgaaaaactggaaacaatcaaaatatctacagacaggagaatataaattaaggcccatccataggatgtagtaattcttagcaacaaaaaggaacaaactactgattcacacaatgttgataaatctcagaatgcatgatgctgagtggaagagagaccacactgtgtgattttatttatctgaaattttgcaaaaggctcaactaatctaaggtgatagaaatcagaatagtagccaggtgcagtgactcacgcctataatcccagcactttgggaggccgaggtgggcagatcacttgaggccaggactttaagaccagcttggccaacatgtcaaaaccccatctttacaaaaaatacaaaaatcagcggggtgtggtggcgtgtgcctgtaatttcagctactttggagactgagacatgagaatcgcttgaccctgggaagtggagggtgcagtgagctgagatcgtgccactgcactccagcctgggcaacagagtgaaactgtcacacacacaaaaagaattcaggatagtgggccccaccctatggctcacacctgtaatctcagcactttgggaggctgagacaggaggatcgcttgaggccaggaattcaacatcagcctggataacagcaagaccctgtctgtctctacaaaaaatacaaaaattagctgggcttggtggtgagggcctgtagttccagctactcagaggctgagacaggagaattgcttgagcctaggaggtagaggcttcggtgagctatggttgcaccactgcactccagcctgggcaacagagcaagaccctgtttctaaaaagaaaagaaaagaggccgggcacggtggctcacgcctgtaatcccagcactttgggaggccgaggcaggcggatcacgaggtcaggagatcgagaccatcctggctaacatgatgaaaccccgtctctactaaataatacaaaaaacaattagccggacgtggtggccggcgcctgtagtcccagcttgtcgggaggctgaggcagaagaatggcgtgaacctgggaggcagagcttgcagtgagccgagatcgcaccactacactccagcctggctgacagagcgagactctgtctcaaaaaacaaaaaacaaaaaaaaaaagaaaagaaaagaaaaatcaggccgggcctggtggctcacacctgtaatcccagtgctttgggaggccgaggcgggcggatcatctaaggttgggagtttgagaccagcctgaccagcatggtgaaaccccatctgtactaaaaatacaaaaattagctgggcatggtggtgcatgcctgtaatcccaactactcaggaggctgaggcaggagaatcgctagaacccgggaggcagaggttgcggtgagcccagatcgtgccattgcactccagcctgggcaacaagagcaaaactccatctcaaaaaaaaaaaaaaaaaaaaaaaaaaatcagtggagtggctgtgggtggggaatggatgaagggacattgatttctgggccgtctgaatggaagtgttccttactttgatggggtggggacacggggtcgtgcatgcaaataatatgtgcaggcttgggacttcaccgcatgtaaattaactctcaataaagttccaggaaaagtaattccaattccagcaaccggattttgggctcagttcggaggctagcctgcaagccttgctggtgggtggcctgtaggggtgacaggaaaccccccgggcctccgctctttaggggagggggagcctcgcccttgcccccctccgggacgagcgggcagatctaaaagcttccctaccgccgcccaggcggtcgatagcagactcccaggctccgtttctgcctgcccggcagcccgggcccttcccgccagcccagcccctgggaggggacccgagccgggcggagcctcctccggagccgcacgccgggctcggctcaccctccccggatgccgctcctcctccatccccagaagtttcagccactgagattccccttgtcccggaggctggaggggaagacccaggcggctgcgctttggaggctggaccatcgtggggcttgtctgtgcccacttttcccccattcaagagttaccactgccaggcgcagttgctcaggcctgcaaacccagcactttgggatggcaagacaggaggatcgcttgagcccaggagcttgagaacagcctggacaacatggtaagaccgcatcactatattaaaaaaaaaaaaaaaaaaaaaaaaaaaaaaaaaaggctgggcgcggtggctcacgcctgtaatcccagcactttgggaggccaagaccggcagatcacaaggtcaggagattgagaccatcctggctaacacggtgaaaacccgtctctactaaaaatacaaaaaattagccaggcgtggtggcgggcgcctgtagtcccagctactcaggaggctgaggcaggagaatggcgtcaacccaggaggcggagcttgcagtgagccgagatcgcgccactgcactccaacctgggcgacagagcaagactccgtctcaaaaaaaaaaaaaaaaaaaaaaaaagaggctaggtgcggtgactcacgcctgtaaccccaggagtttgtgaccagcccggccaacatggtgaaaccccgtctctactaaacacacacacacacacacacacacacacacacacactcttagccgggtgtggtggcgggcgcctgtaatcccagccactcgggaggctgaggcaggagaattgcttgaacctgggaggcggagcttgcagtgagccaagatcgtgccattgcactccagcctgggctacaaaagcgaaactccgtctcaaaaaaaaaaaaaaaaaaaaaaaattcaagcctagtggattggaaataccactttccctgtcttccttcatcctttccttagtcactatctagacaccctttttactgggagtctgggttacagggttacattaaccagaaccttaaagagaaaaatactgtaattgcaaaaacgaccagccttttaaaatggaacaaaagagactagaaaatatcagaacccactgcacagtagaaatatgactatgacttcctgaaacttttgttttagttccaaacctgggtagaaggcctacgttgcaatgtaaaaaattaattctttgatttgtgatcaaagtgcttgaaagatgtggttatatatgatgtttgaaattggttttcttttttttttaattaatatatcacagaggtcacgctgtgtcaatgaatataagttttagcacttgaattttcttttcttttttttgagactgagccaccttatcacccaggctggagtgcagtggcgagatctcggctcactgcaactttcacctcctgggttcaagcgattctcctgcctcacctcccaagtagctgggattacaggcacccaccaacacatccagctaatttttgtattattagtagagacagggtttcaccaagttggccaggctggtctcgaactcgtgacctcaagtgatccgcccacctcagcctcccaaagtgctgagattacaggtgtcagccaccacacccagcttttaatttccttttctttgttgagacaggttctcattctgtcacccaggttggagtgcagtggtgcgatatgcgctcactgcagcctccacctccttgggctcaagcaatcctcccccctcagcctcccaagtagctggaagtacagacatgtgccaccatgcctggctaattttttagtttttgtagagttgggatctggctatgttgcccaggctagtcttgaactcctgggctcaggcgatcctcccacctgggcctcccaaagtgctgggattacaggcatgagccaccatgcccagcccactttcattttctactatgcatgtagccaatccccagagcccaggtacctccattgtttccagcctcttttaaagcttttcttaatgatggtaacagcaagcatcctctatgtgcctggcagaaggctaagcatttcacacactttgcctcatggagtcctcatgagaggcccattttactgatgagaaaatctgggaaccgtaacaataaaccatatgacttaggtcacacagcttgaaggtggtgaagccagaattcgaaccctggctgtctgattccagagctcttaaccaccctgtgttagttattcttttcttttcttttctttttttgagacgaagtcttgctcttgtcccccaggctggagtgcaatggtacaatatcggctcactgcaacctctgcctcccaggttcaagcaattctcctgcctcagcctcccgagtagctgggattacaggcgcctgccaccacgcccggctgatttttgtatttttagtagagacggcgtttcaccatgttggccaacctggtctcgaactcctgacctcaggtgatctgcccgcctcagcctcccaaagtgctgggattacaggcgtgagccaccgtgcccagcctattctttatagttctccacctatttgactgattatatccctgacataaattcctagaggtggatttgctgggtcagagaatccacatgcttaaaggtttaatactaatatctagaacaccatcccaagaaagttgtatcgtggccgggtgcggtggctgacatctgtaatcctagcactttgggtggccgaggagggaggatcacttgagatcaggagtttgagaccagcctgggcaagtcgtgagaccccatgttacaaaaagtttttaaaaaattagctgggtgtggtgacctgtacctgtagtcagctatttggcaggctgaggtgggaggattccttaagcctaggaggttgaggctgcagtgagccgtgattgtgccactgcactccagcatgggtgacatagtgagaccctgtctcaaaaaattaaaaaaaaaaaagttgtgtcaatttaaactcccatgaccgtgctcaagtgtgcattcccaaaacttcacacacactcataagcttgacaaggaaaagtgattcttcagctgaacggtcagattgagcatctttacagaggtttgttaagctctcactcctttgtgaaccccctattcaagccctgtgccaatttcacatttgggatgtttgtcttttttttcttattgattcatatgtgctttttgtatattaaggctcttaatgatttgtctgccatatacgtggcaaacaatctaatctcccttgatcttttcttttccttttttttcttgagatagagcctcactccgttgcccaggctggaatgcagtggcaccataatagctcaccgcaatcactgcagcatcaacctcctgggctcaagccatcctcctgcctcagcctcctgagtagctgggaccacaggtgtgtgccaccatgcccagataaatttttaaaaattatttttgtagggatggggtctcactatgttgcccaggctggctatctcctctgatctgggactccagctagatctccttttattgcccaactggcctcaatgaacatttctcttctgtctaggcctcattgcaggttgcattttattggcggttcctccagaaacaaaagcagagactttgagatcttatgaacctcagtcttacccagaacacttgaagaacccttcagctttccatggcaagaaagctcaggccctggggccagaagccacggctttgtgtctgggttctgtagtttactgctatggctccagtttctgattcctccaagttaagatgggttggtaaattctgccacgcagaatgcgcttctagccacgcccactgtgtatcaaaccatgcccactgtacataaaccacgccctctcatctagctacgcccaccaatcgtctagccacgcccaccttcgagtggagaggtgtgattagagcattaaagagagaggcgtgattagagcattaaaaagaagtgaagaaccgaaatagtgaggatcctgggccagggggaggaggagggagaagatcccctggcctcgatggctggcaattccttcatgcccctagcacccacctggttaaagaaaggatagctgggcgcaatgactcactcctgtaatcccagcactttgggaggccgaggcaggcaaatcttgaacttgaggccaggagttcaagaccagcctgatcaacatggcaaaaccccatctctactaaaaatacaaaaatcagccggtgtggtcgtgtatgcctgtaatcccagctactcaagaggctgaggcacgagaatcgcttgaactcagcaggcgaaggttgcagtgagccgagatcacaccacttcactccagcctgggcaacaaagcaagactgtctcaaaaaaaaaaaaaaaaaaagaaaagaaaagaaaagaaaaaagaaaaagaaaataaaaaaaagaaagaaggaggcacctggctactgtattccacctttctcctcacccactcttttttttttttttttttttgagacggagtccttctctgtcatccaggctggagtacagtggcaccatctcggctcactgcaacctccgcctcctgagttcaagctattctcctgcctcagcctcccaagtagctgggactacaaacacgcaccactacctccggctaatttttgtatttttagtagagatggggttttgccatgtttttcaggctagtcttgaactcctgacctcaagtggtccgcccgcctcagcctcccaaagtgctgggattacaggtgtgagccaccacgcccggccctcacccgctctttaaaatatccctaccagggtcaatggtttatctgtgcctcagtgttcccatctgtaaaatgaggataattttaaggattacctgagttagcatctgtgaaggggttagaatggtacctggcacatagtaggcactcaataaatggcatcactgatatggttccacggatggttgtattattaataggaataaagtgtgggatggaaaaacgttgctctgggcacctggaaccagccccaggggcacgtggggctctacacaggctctttaccccatgccagcgggaggacactttggggggaaactgaggcactgacaatcccctgccttcccagccctgagtccttctcacccatgcccagagcctcagaggccagcaaggtgccccaagggaaagcgacacttctgaactgcgctgcctggcacaattaccgttttcatcctcattaaactacattttcattctaattagagtttcaccgcctcccagagagaagggccgattacttttcagcatcattaacactggctccctccccactttcctcctcccctgcccaggctcccactacaccagggcattctctctctctctctccttcaccccatggaccagagagaagcaacagaacatttattgtcgcctactgggtgccaagttggatgctaggaaccttcccccacagcctcttcgccttatcttgggctggtctaattttctttttgtccccaacacttacccctttttgtttttgttttgttttgttttgttttgttttgttgagacagggtcttactctgtcgcccaggctggggtgcaggtgcgtgatctcggctcactgcaacctccgcctcccggattcaatcgattctcccacctcagcctcctgagtagctgggattacaggtgcacaccaccacctggctaatttttgtatttttttttagtagagagggagtttcaccaggttggccaggctggtctcaaactcctgatcccaagtgatccgcctgtcttggcctcccaaattgctgggattacaggtgtgagccactgcgcccggccccttttgaacatgctctatgctttatttgttctttttatcctctgtctccccctccccagaatgtcaacacccactcatgtcccccacgcactcctgggcacgctgaccccacagcttctaagaaccagctcccgagaagtggctctggctgctgagtgggtggaaagtatggagaacaaacactctcctggagcagaccttgagcaatggctgatgggagttggtggataaatatcccagctccctcgcccctaggtgggcaccctctgaagagtgtgctctatttgatttcagcattctccagcataattgagttgcccacagtggaaactggctcataaacacccttcattggctacctgcccttcccttcctcactctccttctcccctacccatgcttactgagatcatctctcagatcaaccatatcctagatctcccagcccctttggagttcaggcaaaccagagagggactcaatacccaaggaacaggttaagaaagcctctgcaaagccaggcacggtggctcatgcccgtaatccagtgctttgtgaggcagaggcaggaggatcatttgaggccaggagttcaagaccagcctggccaacatggtgaaacctcatctctactaaaaatacaaaaattagctgggcatggtggctcatgcctgtagtcccaactagttgggaagctgaggcaggagaatcaattgaacccaggaagcagaggctgcagtgagccgagatcatgtcactgcactccagtctgggcaacaaagcgagactccatgtcaaaaaaaaagaaaaaaaaaaaaagaccagcctgggcatcatagtgagatcccatctctaaaaaaaagaattggccgggtgtggtggctcacgcctgtaatcccagcactttgggaggccgaggtgggtggatcacaggagattgagaccatcctggctaacatggtaaaaccccgtctctattaaaaatacaaaacaaaattagcagggtgtggtggcgggcgcctgtagtctcagctactcgggaggccgaggcaggagaatggcacaaacctgggaggcggagcttgcagcgagccgagattgtgccactgcactccagcctgggcgacagagcgaggcttcgtctcaacaacaacaacaaaagaattagctgagcatggtagtgcatgcctataggcccagctatttgggaggctgagatgggaggatcacttgagcccaggagtttgaggctgcagtgagctatgatcgcaccactgcactccaacctgagtgacagagagagaccccatcttttaaaaaataaaataaaacaaaataaagaaagcctccgcacctctctcactctggacaaaaccactattatgaccagaatgcagcatcactgggcagctatgacctatatttgaaatacattcttagaaaggttccatttggaagggagtgcaacgtgcacagcacttttggggagcaacttggcagagtgcattaaaacatgaagtgcaggccgagtgcaatggctcatgtctgtaatcccagcactttgggaggctgaggcaggtggatcacttgaggtcaggagtttgaagccagcctggccaacatggcaaaaccctgtctctactaaaaatacaaaaattagccgggcttggtggtatgcgcttgtagtcccagctactcaggaggctgagacaggagaatcgcttgaacccgggaggcagaggttgcagtgagccaggatcgcaccactgcactccagcctgggcgacagtgtgagactccgtcccaaaaattaaaaaaaaaagtgaagtgcagccaggtacagtagttcacgcatgtaatcccagcactttgggaggccaaagtgggaggatcgcttgagcccaggggttcaagaccagcctgggcaacatagcaaaaccccgtctctgcaaaacaatatacaaaattagccaagcatggtggtgctcacctgtagtcttagctacttgggagactgaggtgggaggatcccctgagccctggatattgaggctgcagtgagctatgattgcaccactgcactccagcctggacaacagagcaagaccctgtctaaaaaaaaaaaaaaattaaataaataaataaagacaccagccatattggatttagagcccaccctaatccaatgtgacctcacattaacttaactgattatatctgcaaagaccctgtttccaaataattcattcaggagaacccagggttacgacttcatttttttttttttttgagacactctcgctctgtcgcccaggctggagtgcagtgacgtgatctccactcactgcaacctctgcctcctgcatgccaccatgcccagctaatttttgtatttttggtagagacagagtttcaccatgttgcctaggctggtctcaaactcttgacctcaagcaatccacccacctcagcctcccaaaatgctgggattacaggcatgagccactacactcagccttctgttttttgttgtttgtttgtttgtttgtttttaatagagatagggtcttgctgtgtttttaatagagatagggttgcccagaccaacctcaaactcctggcctcaagcaatcctcctgccttagcctctcaaaattcaaattatagcctgggaacaggcatgagccaccgcacctgaatcaacatatctttttttttttttccgagacacggtctcgctctgtcacccgggctggagtgaaatggtgcgatctcggctcactgtaacttctgcctcccgggttcaagcgattctcctgcctcagcctcctgagtagctgggcctacaggcaagtgccaccacgcccgggtaatttttgtatttttagtagagacggggttttgccatgttggccaggctggtctccaactcctgacctctggtgatctgccggccttggcctcccaaagtgctgggattacaggtatgagccaccgtgcccggtcgatagccccattttacagacagaaaactgatacccaggtacatggattccctgtgagcagatcacaccgctggtaagaggcagagctggtctcagtggctgctgagcccttacgtgtatatgacatgaaacgcacatggtcatttatgtattccaacaaccttgcaaggcagaaaataccttcatgttatagatgaggaaacggaggcaaggagcgagtaagcaacttgcctgaggtcaggtgggtgccagagcagggacttgagcctcggtagctgaccatgggaccctctgggggaccacgggctccatctcctgggcgttggagtgagggtctctttcagcacaaatgttccatagccatagggagaaacagggactgcagcctagtcccccaggactgggccagggagaagccctgactggttaagaccttccaggtaggctgggcgtggtggctcacacctgtaatcccagcactttgagaggccaaggcaggcagatcacgaggtcaggagttcgagaccggcctgggcaacatggcgagactgcatctcaaaaaaacgacaaaagacgtttcaggtggcgctacccataggccctgctcttggtccaggcagcaactgccacgctctggggaccccagtcagcttctaggtatttcagagcctgaggatctaccagagccgctctcaccgcacagggggtttttaatgaatgctaattaatatctgtgttcacagagccagccaggcccctgggcctggagcatccacaggaggaaagtacaagaaccctggcaccctgccaagcagcagggattcttcagacacccaagggctggtttgctgggaaggactcatgtgaccagaaggggaaactgaggcactgctgagcaccaacagtcctggagagctttaagaatggttgccatctgaggccaggcatggtggtttatgcctgtaatcccagcactttgggaggccaaggcaggcaaatcacttgaggtcaggagttcgaggctgtcaggcctctgagcccaagctaagccatcatatcccctgtgacctgcatatacatccagatggcctgaagcaactgaagatccacaaaagaagtgaaaatagccagttcctccttaactgatgacatcccaccatcgtgatttgttcctgcccaaccctaactgttcaactgactttgtgacaatataccctccccgcccttgcaataatgtactttgtgatattcccccgcccttatgaatgtactttgtaggatacaccctccccacccttgagaaggtagattgtaatattctccccacccaacttgagaatgtactttgtatgatccaccccctgcctgcaaaaaaattgctcctggctgggcgcggtggctcatgcctgtaatcccagcactttgcgaggccgaggtgggtggaccacgaggtcaggagatcgagaccatcctggctaacatggtgaaaccctgtctctactaaaaatacaaaaaattaaccaggcatggtggtgggcgcctgtagtcccagctacttgggaggctgagccaggagaatggcgtgaacctgggagatggagcttgcagtgagccaagattgcgccactgcactccagcctgggcgacagagcgagactcagtctcagaaaaaaaaaaattgcacctaactccaccacctatcccaaacctataagaactaatgataatcccatcaccctttgctgactctcttttcggactcagccctgcctgcacccaaaaaaaagctttattgctcacgcaaagcctgtttggtggacccttttcacacggatgcacgtgacagagaccagcctggtcatcatggtgaaaccctgtgtctaccaaaaatacaaagattagccaggcatggtggtgcacacctctaatcccagctacttgggaggctgaggcaggagaatctcttgaacccatgagacgggaggcagaggttgcagtgagctgagattgtgccactgcactccagcctgggcaacagagtgataccctgccctgtccccttcccaccacaaacacacaagaatggttgccatttgaaaggaacaaagaaatgggtattggagaccccagagccatcagcttccacaagagctctggacctcaccccagcctcagcttcctcatcagtaaatgggaacatgaattcctttccttatatgtagtaggcataagaactcattaagcatttatgcatgtgaaatgctttgcagataatcagtttccaataggtgttaactccctttccctgactgtgcctcagttttcctcttgggcatacaagaagctggcagggctttgaggctaccctctgggagagctttgggcatggtgccttgactcagacctcggagcaagtacgaaaaatcacttccgatcggcctcattaataacacagttgctaatgtggcagtaagacagttccctggcccctgattaaaaacagaagtttcccccacattcgtggagatggagcagaagggaaaacaaagacaagcacacttgtgccagataaatacagacgcaaacacatgcatggcagataaacacacactggcacaccaaatatacacacagccggctgcagacatccgggtgggctcgcacagcccgaagagaccaaaagcccgggtgggctcgcacaaaaaggaacagaaaccgctgcagagatgtcccgctggaccctggccacatctgggacctgatcacttcagtgtacttgaacaggagacagagtgtgggaaattgacatccctgggagtagccctgagccagaaatggaatgagttggtggataaataccccagctccctccccagcatatgcctaatccacagtctcccagagacccctggagggatcaggccccagttttccgtagtgacaacctgtttgatatcccttgtcatctctcttctcccctccccaggtttcctgtgttcatttcccaaataaaccacttgccctccaaccctctatcagggtctgtttctgacctgtatgtgtacctcccagaagtatacacagcaatgggtctcaatgagggtaactctgtcacccaggagacatttggcaatgtctgaaggtatttctggctgtaaaattggggcagggggccagacacagtgacttacacttgtaaccccagcactttgggagaccaaagtgggcggatcacttgaggtgaggagttcaagaccagcgtggccaatatggggaaaactccatctctactaaaaatacaaaaattagccaggtgtggtggttagtgcctgtaatcccagctactcgagaggctgaggtgggggaatcacttgaacctgggaggcagaggttgcagtgagccaagatcattccacctcactccagcctgggcgacagagtgagactccatctcaaaaaaaaaaaaaaaaaaaaaaaatgggggcaggggtactcctggcatttagtgggtccagttcagggacgctcaatgtcctacaagggactgggcaaggtggctaaggcctgtgatcccagcacttcgggaagtcaaggcacgaggatcacttgaggccatgagtccaaggccagcctgggcaacatagcaagacctcatctcccctgcaaaaaaaaaaaaatcctacaaggcacagaacagttccccagagcaaaaaatgatgtggccccaaatgtcaagagtgctgacattgagaaaccctggtctacgggaagccactgggccccacgtggaaacagctcagtgcacgcacattattcaaatgcagacacagtgggtgcaccggcagcattagaccacacatacccactgtgcaccaagtccttgaactaaggaaacagcaggatcatccacacctggtgtgttttcctaccaagatgtataaaccagcagaggagacccccaattccacccagatgtggggccctgcccagaccagctttttgtgcaactcacagacaccctggaaagtggttcaatgaccattaaaaccattttagagacgaggcaactgaggcccagacagggtaagtgttttgttgttgtgtttttgtttttgttttttgagatggagtcttgctctgttgcccaggctggagtgcagtggcaccatctcagctcactgcaacctctgcctcctgggttcaaacgattctcatgcctcagtctcccaagtagctacaggcgcgtgccaccacacccagctaatttttgtatttttagtagagacagggtcactccatgttgaccaggctggtctcgaactcctgatcttaagtgatcctcccaccttgtcctcccaaagtgctgggattattggcatgagccactgtgcccagcccagacaggagaagtttatgacccagctagaaacccagagaccccttaggcatgtgtagacatgcttttgaaggcaaagagggtaggatgaaaggagaccctccccaccatcatctcggaattgagataaggagggacaggaagggctttagcttcccagagggaatcctgtatcactttgggtaactagaaaatctattgaaaaatgtttttaggctgggcgaggtagtgctcacctgaaatctcagcactgagggagcctgaagcaggaggatgtcttgagcccaagagttggagaccaacccgggcaacatggcaagacttctcgtctctgcaataaataaaatacaatttttgttgttgttgttgtttgtttgttcttttgagacgaagtttcgctctttttgcccaggctggagtgcaatggcgtgacctcagctcactgcaacctctgcctcccgggttcaaaggagtctcctgcctcagcctcccgagtaaccgggattacaggcgcatgccaccacgcccagctagttttgtatttttagtagagacggggtttcgccatgttggccaggctggtcttgaaatcctgacctccagtaattcacccgcctcagcctcccaaagtgctgggattataggcgtgagccatgacgcccagccaaatacaatgttttttaaacatacattgttttttaaacattggctgactcttggccaagcatcacgcctgtaatcccagcactttaggaagctgaggcgggcagatcacttgaggtcaggagtttcacaccagcctggtcaacgtggtgaaaccctgtctctactaaaaatacaaaaaattagctgggcgtggtggcgcgtgcctgtaatcccagctactcgggagtctgaggcaggagatggcttgaacccaggaggcagaggttgcactgagccaagatcctgccactgcactccagcctgagtgacagagcaaaaccgtgtctcaaacaaacaaacaaacaaaatgggctgactctggactcacacaggcctggtgtctccaatcccagccttgccattttctggctctatgaacctgggtgagccgcatcgcctccctgagcctcagtttccccatctgtaaaacggggattcacccattcaccattccacaaatgtgcacccaagacccactgacaccaagcgctgcgcccagctctaacctatataaagttaaggaagaacacgaacatggtaagtgcgtctccccctcccccaggcatggagctgctgaactagttttgggaatggaatcagagcacgcgtggacagatggagggagccctcagctgcccggactctgcagcccaccacccccactcttctcagatccccctcgtttgaccaaaaagcccctctaccacgaggtaggaccccaagcaggatcccagggactggcgtccaaatccgggccaggaactgaccccagcagccagacccgggacggggctaaagctcgggtttttccacctccgcttcccgccactgcagcgcggggagcgagcgccacctgtgggcctccaaggggaggtgcgtgcgactcccggggaggtggacggtcgcccccgtttctccccaacccgggggacctcgggccctccaggagtttcggaaacagctctcatctcttaaattctcctccacaacccacttttcccggctgccatttcccagctagaactcgtcgtccatgcattcatgcaacatttattgagcacctactgtgtgtattgagcaaacctagatcattgctctaggtttagagtacacagaagacagaatggggctggctcaggcctgtaaccccagccactcaggaggctgaggtgggaggatcacttgagcccagaagatggaggctgctgtgagtcatgatggcaccattgcactccagtctgagaaacacagcgataccctgtctctaaaagtaaaaagaggccaggtacagtggctcggccaggcacggtggctcacgcctgtaattccagcactttgggaggccaaggcgtgcggatcacgaggtcagcagttcgataccagcctgaccgacatggtgaaaccccctctctactaaaaatacaaaaattagccaggcgtggtggcgggcgcctgtaatcccagctactcaggaggctgaggcaggagaattacttgaacccaggagacggaggttgcagtgagcagagatcgtgtcactgcactccagcctgggcgacagagcaagactccatctcaaaaaaaagaaaaaaaatggaaacaaaacagataaacctccatgcccttctggagcttacagtccaagggaagagagaagagaggaggaagaggacaacaggctgcaagatcattgctgatggcagtaagtgcagtaagtgttctgaaggagaaagtatatacagggatgtcactgaagcacctgctgtgggtagagtgggtggagtgggctctgaggaagtgacgcttatcctgaggcctgagaagaataaagccccagccatgccgagtctggagccaggatttccagtagaaggcgcagccagcgcaaaggccctgtggcagaaaggagctcgggtgttgaacagtgggaaaggaggtcacagtagccagagccgagagatgaagaaacaggtgggctgcgatgtcaaggcctattttggagacaaatctgatctctcactccccctgaggagtcacctcctaaaagcccgaggggagaagaaggctcacactgagctaaaagccctccaacaccaccagctgcacccttctcgtcgcccacccacagatatggtgtcgcccacagaaagaagccctggcccatgcactgtccccctacccaccccaccactctcccaggactttgcctctgaccatattgaccccaattatgcagttaaggtgcacgtggtcggctctgcttgcaaagtccccttcttaccccctgcccatctccctgggagacacagggaaccatgcaatgtgccttccaagaccaatgcttggccaggcgcggtggctcatgcctgtaatcccagcactttgggaggccgaggtgggcggattgcctgaggtcaggagtttgagactagcctggccaatatggtgaaaccccgtctctactaaaaatacaaaaattaaccgggcgttgtggcaggcacctgtaattccagctactcgggaggctgaggcaggagaatcacttgaacttggggggcagaggttgcagtgagctgagattgtgccactgcactccagcctgggtgaaagagtgagactccgcctcaaaaaaaaaaaaaaaaagttgccagccccacacacggacctcagcccggcctgccccctttgccttcatactcccgagagcagtctccccatgtggcctgacaaccccaaaagggactatgcagggaggagatctggtttcatgaacattgctcttgggatccctgcctgggggtggccacgagagaggctgtgggtcttgcgcagccacagaaggggagcagagccctgtccccgactccccgccagtgcagaaggggtacaccctctctccacagcctggcctcagttctggggactgcctggctattggggagagggcagagcctcttggagcttgtaattaaggcttcagaggcaccgacttaattactaccttgtgaagggttaattacccctaattgttcaggaatcaggcaatttttgtgccttcagagaatcaaaatattttcccttccagaagtgcctcctcccttttgctttttctaatttccctgcaaggaggggcacgatgggctgggtggggtccggaggatcggaaaccaccagtctcccctcagagaacacacttgccgggcctgccgcaagcaagagcgggattcagaggagagaggttcccagccagctcaaggcaggaagacttcctggaagaggtggccatgggttggtcttaaggaccccaagtcaacctcccaggtaagccaagggctcctagaattctgtgccacctagagggtagcagggcctggggaagctggagctgatggtttcaggcatgggaatgctgcctggagtctcagtttcctcacttgttaaatggggccagggctgcgatgagccaggcagagtgagcagggaataaaggctgccctcggagatgaaatcctggtgggcaccgagaagacatcactcatctgcagctcatctagcttgttgctcctctgcctgggtttgtagtaatgtaagaattagggcccacccacttcccagccctcatctccctgccttcctcctaacccccttgatgggctttgaacacaccgcactggttcccaactcagaacttttgtccctggtgttccccctgcctggcttactttcccccctgatggtgctgtgtctgagaagcttttgtcctgaaatgtcacctcctccagggagccttccctgaccaccctctctcccctgaaccactccttcctgggaattctccagcttatcacacttcttcttttttttttttttttttttcaggtggagtctcgctctgtcgcccaggctggagtgcagtggcgtgatctctgctcactgcaagcccctcctcccaggttcacaccattctcctgcctcagcctcctgagtagctgggactacaggcacccgccaccacacccggctaattttttgtatttttagtagagacggggtttcaccgtattagccaggatggtctccatctcctgacctcgtgatccgcctgcctcggcctcccaaagtgctgggattacaggcgtgagccactgcgcccggccttctatctctcttttgctctctctctctctcttttttttttttttttgagatggagtctcactctgtcacccaggctggagtgcagtggcatgatctgggctcactgcaacctgtgcctcctgggttcaaatgattctcaggcctcagcctcccgagtagctgggattacaggcgcacaccaccacacctggctaattttttaatatttttagtggagatggggtttcaccatgttggccaggctggtctcgaactcttgacctcaagtgatctgcccacctcggcctcccaaagtgctgggattacaggcatgagccgctgtgcccggcccttgctctctgtttttacagagacagggtctcactctgttgcccgggctggagtgcagtggtatgctcatagctcactacagccttgaactcctggcctcaagcgatcctccaaagtagctgggactataagcacgcaccaccacatctagataatttaaaaatagttttttgcagcgatggggtcttgttatgttacccagactggtctcaaacttacggcctcaagagatccttctgcctctgcctcccaaagtgctgggattacaggcatgagccactgcccctggccacacttttacctctcttatgtaaattgccttgtttagatcctggctgggtgactcagggcccagtatcctcatctgtgaaatgggggtgatgacaacagcctcctcagagttccagacctgactgtggtggccgtgggggtccggtgggttgagaccttcttctatggccaaggagtggacttgggggagcagggcaagtgagccaggagcaggggccagagggccggagcagggcaagtgagcaaggctcaagtgatgggtcagtcagaaggggttagaggactgacatggtgtctcacgcctgtaatcccagcactttgggaggctaaggcgggcagatcacttgacatcaggagttcgagaccagcccgggcaacatggtgaaagcccgtatctactaaaaatatgaaaattagaggccgggcgcggtggctcatgcctgtaatcctagcactgcgggaggccgaggtgggtggatcaggaggtcaggagtttgagaccatcccagccaatgtggtgaaactctgtctctactaaaaatacaaaaattagctgggcatggtggcatgcgcctgtagtcccagctactcaggaggctgaggcaggagaatcgcttgaacccgggaggcagaggttgcagtgagcctagattatgccactggactccagcctggactccactggcagcctcacagagggagactccatctcaaaaaaaaaaaaaaaagaaagaaagaaagaaaaaaagaaattagctgggcatggtggcgggcacctatagtcccagctactcaggaggctgagacacaagaatcacatgaacccaggaggtggagattgcagtgagcaaagatcgcaccactgcactccagcctgggtgacagagcgagactctgtttcaaaaaaaaaaaaaaaaaaaaagggcgtggttagagaggaggcagacttgggaacaatgggtatactgttatgacctcattttatagatggggaaagtgaggccccagaaaggtgaagtcacttagcgagggcacgcagccctctagtgggggagccataattcattcccatactgggcagagtcccccacacagagtgggggaggggatggcaggggaaggcggaggagggaatgatgggtggagagctgtttggcagaaaggtgaaatacggttttgattcagctgtgttggaggacatagtgactctgccaagatatagtagagattaaattaggcgcgctggcttacgcctgcaatgtcagcatttttggaggctaaggtgggccgatcacttgaggtcaggagtttgagaccagcctggccaacatggctaaactccgtccctactaaaaatacaaaaattagccaggcatggtggcaggtgcctgtaatcccagctactcgggaggctcaggcaggagaattgcttgaactgggaggcagaggttgcagtgggccaagatcatgccactgcactccagcctggaccagagttggtcctgaaaaaaaaaaaaaaaaaagagagagaaaggaggaaggagggagggagagaagaaagaagagagtgagcaagggagggagggagaggtggttgattggggaagactattctagttgcaagtaaaaaatccaaacccaaactggcttaaagaaaaaataatgataatttattggtttgtgtcattgaaaagtttaagatatgttggcttcagggacagctggattcacgggctcaaacaaagtaatctggctgggtgtggtggctcatgcctgtaatcccagcagtttgggaggccaaggcaggaggcttgcttgagcccaggagtttgagaccagcccgggcaacatagtgaaacctcatctctataaaaaaaaattaaaaaataaggagggaggatcactcgagcctgggaattgaggctgcagtggaaccatgatcgtgccactgcactcacacctgggtgacaaagtgaagccctgcttcaaaagaagaaaataataattcctgggctccctctgattggacagtttggggtcacatgtcatttaggaaccaatcacagtggctagaaaggatagaatgagtccatgagccactcctgttgatgagggtggggatggccctacagacctcagtagacaaagagtgtaggcaaaagtgacaatttattcaagaaacatttatttatttatttattttgatttatttatttttttgagacacagtctcgctctgttgcccaggctggagtgcactagcgcaatctcagctcactgcaacctccgcctcctgggttcacacaattctcctgcctcagcctccctagtagctgggattacaggcacgcgccaccacacccagctaatttttgtatttttagtagagacagggtttcaccgtgttggccaggctggtctcgaactcctgacctcaggtgatgtgcccgtcttggcctcccaaaagtgctgggattacagccctgagccactgcacctggctgagaaacattaattgagcacctgtggtgtccctggccctgttttaggtgctgaggatacagcagtgaacaagacagaaaaacccctgcccccatgggactgacactctatgtaaattcatgaattaaaatattagaaggtgatgtgctatagagaaaaataaaatagaggggaaaggttagaaaggactgggggaaggaagctaaaatttcaaatatgggggtcgtcagggaagtactcactgaggaggtgacctctgagcaagtatgttaggcagacaaaagagtgagaggggccaggcgcagtggctcatgcctgtaatcccagcactttgggaggccaaggcaggcagatcagttgaggtcaggagttcgagaccagcctggccaacatggtgaaaccccgtctctactaaaaatacaaaaattagccgggcgtggtgatgcccacttgtagtcccagcttttcgggaggctgaggcaggagaatggcttgaacccaggaggcagaggctgtggtgagctgaggttgcgccactgcactccagcctgggcaacagagcaagactctgtctcaaaaacacaaaataataaaaaaataaaaaaatatctgggggaaaggtgttccaggcagagggaacagcgcatgcaaaggctgtgaggctggactgggcctggcatatttatttggggaacagtgaggaagctggggtggctggagccaagtgaatgaggggaagagagctggaggtgacagggcaaatcacacagccaagccttgtgggccttggggaagactggattttactgggtgaggtgggagccatagaggcttcttggagagaggaagagcttggtctgaacggattcaggtgctcacaggaagaacagacggccagaccaacataacagctgtcacagatacaggaagagattttatatctccctgcggttggttttgttgccttttcacacgactcatggggcgaggcaccagtggggtgaggagctgggaggacaggccaccccagagttccccttcccaggagtcagggagcccccaccccaccatgtcccaggacacactcgggcagggctgccaggagtgtttgtgtttcaccctctctagatgggtggaaatgaggtgtggctggggaggtggtggggtggccaggagggaagctgggtcccggagaggcaggacccgtgaaggcatcggggaagggggtgccccctctgagaaggcacaggggtcttgctgtctcctttctctatttgagtatcaaaggcctgctcaagcccgaagctaaagggaaggtcaaggatgttgggggtgtcaggctgtgggtggctgggtttggtcacagctgcaattgtactgccgataaggaccctcgaggctgaatgtcagcccggccagggttgggcaacatcctgttggggaagtctcttctagttatggttttcgcttctccagccctgccctgaccctaatgggagaattacaggcaggggagcacacactgaacgcgcacgttaccagaaacagaaataactccctttaaattttcccaagaataggatatacacgtgtaaaaaaataataataataatttaaaacttagacccagctgggcatggtggctcatgcctgtaaacccagcactttgggaggctgaggtgggtggatcacctgaggtcagaagttcgagaccagcctggccaacatggtgaaacaccatctctactaaaaatacaaaaattagccaggcttggtggcacatgcctgtaatcccagctacttgggaggctgaggcaggagaatcacttgaacctgggaggcagaggttgcagtgagccaagactgagccactgcacttcactgtgcgtgatgggagcagagactccatctcaaaaaagaaaaaaaaattagccgggcgtggtggcaggtgcctgtaatcccagctacttgagaggctgagggagaatcacttgaaaccgggaggcagaggttgcagtgagcagaggtcacgtgccattgcactccagcctgggcaacaagagcgagactccgtctcaaaaaaaaaaaaaaaaaaaagaacttagaccctacctcataatcacacacaaaaagtaactaaatgactaaatgagactaggcgcagtagctcatgcctgtaatcccagcactttgggagactcaggtggagggatcatctgaggtcaggagtttgagaccagcctggccaacatggcaaaaccccgtctgtactaaaaatatttaaaaagtagccaggcgtggtggctcatgcctgtgatcccagctactctggaggctgaggcctgagaatcacctgaactggggaggcggaggttgcaatgagccgagattgcaccactgcactccagtctgggcgacagagcaagactccgtctcaggagacaaaaaaagaaaaagaaatctttgagaccatggattaggcaaaggtttcttacctatgtcaccaaaaccacaatccgtaaaagaaaaaaataatgagcgaattgaacttcatcacaatgaaaacttttgctcttcaaaagacataaagaaaataaaaagacaagccgccaactaggaggaaatattttcaaatcatttttctgaaagaatgtgtatccagaatatataaagaactcttaaaataaaaactctttatataagaatatatacggaactcaacaataagaaggaaaaaaaatcccagtttaaaaatgggcaaaagatttgaacagatgcttcgccaaagaggacatttcgatggtaaatatgcatatgaaaagatgcgcaacagcattagttgttacagaaatgcaaattaaaaccacaaggagataccacttcatacatctattagaagagctaagatttattttttatttttgagatggagtctcactctgtcacccaggctggagtgcagtggtgcaatcatagctcactgcagcctcgacttcctgggtcaagcgatcctcccactttagcctcccaagtcaccaggactacaagtggacaccgccacgcctggctaagttgtgttttggggtttcttttttttgagacagggtctatttctgtcgcacaggctggagtgcaatggtgccatcatagctcactgcagccttgaactcctgggctcaagcgatccttccacctcagcctcccaagtagctgggaaccacaggcatgcaccactctgcctgattaattttttgtttgtttgagacattctcgttctgttgcccagctggaattcagtggcacgatctcagctcactgtaacctccgcctcctgggttcaagtgatcctcctgcctcagcctacagagtagctgggattacaggcatgtaccaccacacccagctattttttttttttttttttttgtatttttaatagagactaggttttgccatgttggtcaggctggttgtgaactcctggccttaagtgatgcgcccatctcagcctcccaagatgctgagaatttttttgtattttttatagagacggagttttgccacgttgcctaagctggtctcaaacttctgagctcaagtgatcctcctccctcagccttccaaagtgttgggattacaggcatgagccactgtgcctggcctcaggtgaactctttttttttttttttttttgagacggagttttgctcttgttgcccaggctggagtggagtgcagtggcatgatctctgctcacggcaacctccgcctcccgggttcaagcgattctcctgcctcagcctcctgagtagctgggactacaggcgtgcaccaccacgcctggctaattttgtacttttagtagagacagggtttctccacgttggtcaggctggtcttgaactcccgacctcaggttatccgcccgccttggcctcccagagcattgggattacaggcatgagccaccgcacctggccccaagtaaactctttaaatcatcttttatgcttcagcttcttccttttttttttttttttttttttttttttgagacagagtctcactctgtcgcccaggctggagtgtggagtgcagtggtgcgatctcggctcactgcaacctccgcctcccgggttcacaccattctcctgcctcagcctcctgagtagctgggactacaggcgcccaccaccacgcccagctcattttttgtatttttagtagagacggggtttcacatgttagccaggatggtctcgatctcctgacctcgtgatccgcccgcctcggcctcccaaagtgctgggattacagggttgagccaccgcacccagcccagcctcttttatgttgacaaattcaagtgtccatcaacagatgaatggacaaacaactgtggtcctcccatgcaaggaaacactggttagcaatagaaagcaacaaactgttgataaacacagcaacatggataaacctcaaaaatatgccgagtggaagaagccagacccacaatattacatattgtacaattccatttatatgaaatttctagaaaaggcagagctctagagacagaaagcagattagtgattacctggagctgaggctgggagtgcggatggattgctaatgtggggatttggggggaaatcaaagtgttctcaaatgctgtattgtagtaatacttgcacagctaggtgagtttactaaaagtcatctaactgtaggtttgtaatgggcgaattataggctatataagttattcctcaataaggctataaaaatgttgccctaggccaggcgtggtggctcatgcctgtaatcccagcactttgggaggccgaggtgggcggatcacaaggtcaggagatcaagaccatcctggctaacacggcgaaaccccgtctctactaaaaatacaaaaaattagctgggcgtggtggcggtcgtctgtagtcccaggtacttgggaggctgaggcaggagaatgacaggaaccctggaggcagagcttgcagtgagctgagatcacgccactgcactccagcctgggtgacagagcaagaccccatctcaaaaaaaaaaaaaaatgttgccctaaaaattcggctatgggcttgtcaccatccgatctattgactcaacaagtccctacagtccccaacccttttctgagctctggaggcacagcaggaaataaaatagacaaatatcctggggctgacattctcagggggagacagagagggagcaagatcaagaactaaaatctagcagggtgggccgggcgcggtgctcacacctgtaatcccagcactttgggaggctgaggcaggcagatcacttgagctcagttcataaccagcctggccaacatggggaaaccccatctctactaaaaaaaaaacaaaaattagctgagcgtggtggcgcatgcctgtaatcccagctactcgggaggctgaggcaggagaattgcttgaacccgggaggcagaggttgcagtgagccaagattgtgccactgcacttgtctgggtgatagagtgagactccatctcaaaataaaaaaaaaaaaaaaaagaaagaaaaaaagtccagcagggtggtcaggcacggtgactcaggcctataatctcagcactttgggaagctgaggcaggaagatcgcttgagaccaggagtttgtgaccagtctgggcaacatagcaagacccctatctctacaaaaaataaaataaacaaaattagtcaagtgtggtggtgcacacttgtagtcccagctactcaggaggctgaggcagaaggatcacttgaacccaggaggttgaggctgcagtgagctgagattgcaccactgcactccagcctgggtaacagagtgaaaccctgtctcaaaatgttcagcactgtcctggtctgtagatagaaaccaaaacaaacaaataaatttatgtattcatttaattaaataaaccaaattagcctggcatggtagtgcagacctgtagtcccagctactcaggagggtgaggcaggaggattgcttgagcccaggagctggaggctgcagtgagctatgatcgcaccactgcaccccagcctgagcgacagagcaagaccctgtttcaaaataaaaagaaaaaagagaaataaagaactaatatatacatctctttaaaagcaaacgaacaaaagacttgggccaagcatggtggctcacacctgtaatcccaggactttgggaggccaaggcgtgcagatcatctgaggtcaggagtttgagaccagcctggccaacgtggtgaaaccttgtctccactaaaaatacaaaaattacaaccgggcgcggtggctcacgcctgtaatcccagcactttgggaggccgaggcaggcggatcacgaggtcaggagatcgagaccatcctggctaacacgatgaaaccctgtctctactaaaaatacaaaaaatgagctgggcgtggtggcgggtgcctgtagtcccagctactagggaggctgaggcaggagagtggcgtgaacctgggaggcgaagcttgcagtgagccgagatcgcaccactgcactctggcctgggcaacagagcaagactctgtctcaaaaaaaaaaaaaaatacaaaaattacctgagtgtggtggtgcgtgcctgtaatcccagctactcaggaggctgaggcaggagaatcacttgaacccgagaggcggaggctgcagccagctgagattgtgccactgcactccagcctgggtgacagaatgagactctgtctcaaaaaaaaaaaaaaaaagacctgaagggggcgagagaaagccatgtggggatctggaggaggaggtggtgctgcaagtgagagtgagctgccgtgcaaagcccctaaggtaggagcatgcccaaaacggcgaggaagctggcctggctgaagggaatgagcaaaggggagagaaggaggaggtgagggcagataagtgctgagcagatcctgcagggccctgtgggccacaagaaggaatttggcttttgcactgagtgaggtgggagccctggagggtccttgagcagaggagggacgtgccctgacagaaaagcatggagcgggcgagcaagggcaggagccaggagaccagggcagaggagtctgcactgggccaagggggagttgatggggccggaccaggtaggggctgtggaggaggtgaaaagtgagtagatgctggatagattttgaaaatagagctctcgggatttgctgatacaatagagagagagagaaagggacaggggcagagatagaggccaggcatggtggctcatgcctgtaatcccagtactttgtggggcagaggcaggagggtcactgaagcctaggagttcaagaccagcctgggcaacaaagtgagaccggggaaggagaaggaaggaaggaaggaagggagggagggagggagggagggagggagggagggagggaggggaggaaggagaaagaaagggaggagagatagagatagaggaaagaaagaaagaaggaaggagaagaaagagggaaggaaggaaggaaggaaggaagaaatggagggagggagggaaggaaggaaggagaaagaaagggaggagagacagagatagatgaaagaaagaaggaaggagaagaaagaaagagagggaaggaaggaaggaaggaaggaaggagagacagagaacgaagaaagagaagaaagaaggaaacagaaagagagaacaaaataaaacagagacagagacatggaggactccaagtattttgccccaagaatctgggccaaaagaaaggaaacaaggtggccgggcgcggtggctcccgcctgtaatcccagcactttgggaggccgaggcgggcggatcacgaggtcaggagattgagaccatcctggctaacacggtgaaaccccgtctctactaaaaatacaaaaaattagccgggcgtggtggggggcgcctgtagccccagctactcgggaggctgaggcaggagaatggcgtgaacctgggaggcagagcttgcagtgagccgagatcgcgccactgcactccagcctgggtgacagagcaagactccgtctcaaaaaaaaaagaaaaaagaaaaaaaaggaaggaacaaggctcagagaggtccaaggagttgccctggcggtccggggccacagtggccttcatccccagctgagatgtgtccccagtctaaggccactcagagccaggcaccttctccggctgcctcccaatccccgccccccgcttccgtcccagcaccctcaccccgcccccgggcccctttgtcctcctcttcgtcttatttccagaatttctcctccctagggaatccagtccatgtgcttttgattcctttgtcctgaactcatgcggcatgagcacccctgaagccttatgtggaaaaatttggaggctgggggtggggagggggtcacattcctcccgggggtacagagctacgtcggcatctccagggccccccagcagcaagcaggcatcctcccaggccaggccagaccggacgctgcccaacacaggctttctttggggcttggccggcgcccgactacagccccggctccagctgccctgcctgtcccccgcccccacgcctcccgtcccaacctcccacacgtttcctcctagaagcccagacccgtgggacttggcctcccccgcgccttccctctctactcagctctgcagctcctgtaggcctcctccccgggtgatcacagaaggaccagctcaccttagcgggacaggcagggcatgggcgtggccagagcctcgggcaggcatcccaggctccctggtgtctctctcatccgctggcctctgtgccctcttctcttccccacccccgctcgtggcccctcctgcctctccatcgcaaagtccccagaggagtctccttaatcacttgcttttgactgaatcctgaccacctggaccctgatctagctactgaggagataaagtaaccaacacttaaaagctaaccttcaggcattctgggaggctgagactgacggatcacttgaggtcaggagttcaagaccagcctggccaacaagatgaaacctcgtctctactaaaaatacaaaaaaattagctggcgtagtggcggatgcctgtaatcccagctactgcggaggctgaggcaggagaatcgcttgaacttgggaggtggagattgcagtgagctgagatcgtgccactgcactccagcctgggcaacaaagcaagactccgtctcaaaaaataaaaattagctgggtgtggggccgggcttggtggctcaagcctgtaatcccagcactttgggaggccgaggcaggcggatcacctgaggtcagaagttcaagaccagcctggccaacatggtgaaaccccgtctctactaaaaatacaaaaaaaaattagccaggcgtggtggcgcatgcctgtaattccagctactcgggaggctgaggcaggagaatcagttgaacctgggaggcagacgttgcagtgagccgagatcatgccactgcactccagcctgggtgacagagcgacaccctgtcttaaaagaaaaaaaatagctggctgtggtggcatgtgactgtagtcccagccacaagggaggctgaggtgggaggattgcttgagcccgggagttcaaggctgcagtaagctatgactgcactgctgcactccaccctggctgagaccttgactcagcaacaatgaaaaagtgacagggccaggacttgacccctgaccattttgttctacagcctttcatgggaaagacagatgagttttcgaccttccagagcctttgatccagaggagagaggcaggaaatagcaaatggataagaatatgccattcggtgactagggcaatggagattgcaaaagatggtggctgggaaatggggcttgtgtcgggggtccctgagaccaccctcagggtcaataatttgctgagattgatagatcccagaaaagtggtgttactcccagttatggtttattacagtgaaagttacagatgaaaatcagcaaagaggccaggcttggtggctcatgcctgtaaccccagcactttgggaggcccagacaggcagatcatttgaggtcatgagttcaagaccagcctgaccaacatggtgaaaccccatctctactaaaaatacaaaaattagccaggtgtggcagggggctcctgtaatcccagctacttgggaggctgagacaggaggatcacctggacctgggaggcagaggttgtagcgagccgagatcctgccattgcactccagtctaagcaacaagagcaaaactccatctcgaaaaaaaaaaaaaaactaggaatactagaggagaggaggtgaggcagacaggctccaagactcctccatgattcccacctcctgatgtctgcactctgtgtgatccctcgagtgtgagctggacccaataacttgcttctaacaatagactaggacaatgtatgccaggagcagtggctcacgcccataatctcagcactttgggaggctgagacagagggatcacttgagcccaggagttcaagaccagtctgggcaacatagcaagaccccatctctataaaaattcaagcattagctgggtgtggtggtgcacacctgtagtcccagctactcgggaggctgaggtgggaggattgcttgtgctcaggaggtcaatgctgcagtgagctatgattgtgccactgcactccagcctgggtgacagagtgagaccttgtctctctcatatatgtgtatatatatatacatatattttttttttgagatggagtctcattctgttgcccaggctggagtgcagtgcagtggtatgatctctactcactccaacctccgcctcctgggttcaagcgattctcgtgcgtcagccttccaagtagctggaattacaggtgtgcagtatcacgacctgctaattttttgtacttttagcagagatggggtttcaccatgttggccaggctggtctcgaactcctggtctcaagcaatccacctgcatcggcttcccaaagtgttgggattacaggtgtgagccaccgcgcctgacctatgtgtatatatatacatatctatagatagatagatagatagatagatagatagatagatagatagatttaatgttaccattttattcatcatggttttgcattaatcttgacttttacaaaatatcacaataaaataatatttatgagttcaggacaaagttcttgagttctttgacaccccctgaaattttgttcccaagtcaagcatccaccttgcctctcattccagccctacagcttaatgatatgagaccatcgtcatgcacaagacaggactggatgagtgacatctacagattctgctgccacactggactcaaggcaggttcagttctgctgcagtaacaagccagggaaaaaaatgagccaggcatggtggcacacacctgtagtcccagctactttaagccccaaatctcaggagcttaaaacatcagaggtttcacttttcactcagccagcatctggcatgttgcccgttgccaaggcagaagaaaaagaacatatagcatgctctgcagcagctcttaaagcctctgcccagaagtgacacaagtcaaacctgctcacatgccattggtcagagcaagtcacgtggccacacaagtgggtggagcaatgccttcctaccttgtacctggagggagaaagagctggaatattggtgaatcgctcagtgatcatagcagtgtccctgggtgaggtccagagggcagctgtatgtctggaggtagacagggaggtccaggtggagacatgtaagaggctttgggatataattggtattgacttcttggagggcctgatcaccccctactatggaggacacatgggggtcacctgccaggacccacaggatgggaatcctgccccagtctcctctgagactggatttttttttttttttgattttttttttgagacaggatctcgccgaagtacagtggtgcaaccatatagttcgctgcagcctcaacctcttgggctcaagcaatcctcctgcctcagcctcccgagtagctgggaccagagtcatgtgccatcaggcctgggtaatttttaaactttttttgtagagatgggggtgcgggtctcgctatgttgccctagctggtcttgaactcctggccttaagcgatcctcctgcctcgtcctgccaaagcgagccaccgtgcctgtccttcagcctggataaaatttgtggtgaaatacacatgacatgaaatgttctatcttaaccattttaagtgtacagttcagttacattaagaaaattgtcaggccgggcgtgggggctcatgcctgtaatcccagcactttgggaggctgagatggacagatcacttgaagtcagaagttcaagaccagcctgaccaatatggtgaaaccccgtctgtcctaaaaatacaaaaattggccaggcacggtggtgtgaacctgtagtcccagctactgggaggctgagacaagagaatcacttgaacccaggagacagaggttgcagagagccaagattgagccactgtactccggcctgggcaacagagtgagactcagtctcaaaaagaaaagaaaattctcagttgggcacagtggctcacacgtgtaatcccagcactttgggaggctgaggtgggcagatcatctgagatcaggagtttgagaccagcctggccaacatggtgacaccctggctgtactaaaaatacaaaaattagccaggaatggttgtgcacacctgtaatcccagctacttgggaggctgaggcacgagaatcacttgaacccaggaggcagaggttgcagtgagcccagattgtgccactgcactgcggcctgggcaacagagtaagaccccgtctcaaaacaaaacaaaacaaaaaccagaaaaaataaattctcatagttgccactgacaccatcattcatctccagaactttttcatcttgcaaaactaaaactgtatccacaaaacaactccccgttcctcctccctccagttcctggaaaccacaattctactttctgtttctatgaatttgacaagtttagttacttcctgtaaatgtgatcatacggtatttgttcttttgtggcaggtttatttcacttagcataatgccctcagggtgcattcatgttatatgtacgagaatttccttcctctttaaggctgagtaatattccactgtatagatagaccacattttgtttatccattcatctatccatggagactggttgctttcaacttttggctattttagctaatgctgccgtgaacataggtgtacagatgtctctttgaactttgctttcaattcgggtgtctatgcagaagtagaattgatggatcatatgacaattctatgtttaattttttttttttttttgagatggagtcttgctctgtcacccaggctggagtgcagtggcgcgatctccgctcactgcaacctccacctcccgggttcaagcgattctcctgcctcagcctctcgagtagctgggattagaggcagctgccaccacacccggctaatctttgtattgttgtccaggctggtctcaaactcctgacctcaaatggtccacccacctcggcctctcaaagtgctgggattacaggcatgagccaccatgcctggcctctatgtttaatttttttaggactctccatactgttttccacagtggctgcaccattttacattgtcaccagcagcccacaatggtttcaatttatggggttttgttttgttttgcttttttttttttttttttttggacagggtctcactctgttgcccaggctggagtgcaatggtgcaatcatagctcactgcagccttgacctcctgggatcaagcgatcctcttgcctcggcctcccaagtagttgggactacaggtgcatgccaccatgctcagctaatttttaaatatttttagaaatgaagtcttcctttgttgcccaggctggtcttgaactcctggcccaactgatcctctctccttggcctcccaaagcattgggataacagttgtgagctaccacttctaacctattttctgtttttttgatagtagccatcctaatgggtgttaggtagtatctcactgtggtttttatttgtttattcatttatttatagagatggagtcttgctatgttgcccaggctggtctcaaactcctggcctcaagtgatcctcccacctcggcctcccaaagtgctggaattacaggcgtgagccaccgcacctggcctgtggttttgatttgcatttccctaatgattggtgactttgagtatcttttcataggcctattggacatttgtctggcctggaattttaacaactctgtttcaaaggaagcacagagtgtgggtgtcaatctccttgccaatgtcagggccgcctgacctcgtggatagcaggcagcccagagctggctcctcgggccggacagaagctgggcatgagaggctgtcgtgggagtgacaattccactaggggaatgccagattgccactgaactttgtcactaagacccacaccaaaggccccagaaagccccagtgacacttttgcccctagataggagggtaccgacaggaaatgctgtcagaaaaatgcctccttgtacactcaaaaatggcttttgccgtctgcccagaggggcccctctccccctgactcaccgtagcagcgcgtggaggacaattttggctgtgacaacgtcacgcccgctgcggggagttgatctgcaagccacaaacgtcattcattcctctccacctccaggatttggaacatctccccggaccacagatttttccttcaatcaacttgcttttcctttaaaaaaaaaaaaaaaacttaaatgaatttatttgggaaggaacttttatgccaccaccacaaaaggaaacaaaaggaaaccagggccatttccataagtagaaagcaacagcaaaaggacctatatttgtaggggtgggggtgaaattaaacttgcttcctgctgtcgcctggttgaagcctcaagagccgggactagggtagggagagggaggtgcccaggcgtagaatataatgagtcgctcactcgcaggaccctgggatccacagcctcaccctccagtgaagctctggatcaaagagactgctctttttgtttaaaaaaaaaaattgaaaggagacaaaaagggaaagaaataggccaggcgcagtggctcacgcctgtaatcccaacagtttgggaggcagaggcgggaggatcgctagagctcaggagtccaagaccagcctgggcaacataatgagacccctgtctcattataaaaaagtaaagaaaaaaaatggggaaggaaattaaaaaccgaaagcgacgactgaagtgtttagaggtgtcagagatatagctgtgaaaaactcagacttctttttttttttttttttttttttgagacagagtttcgctctgtcgcccaagctggagagcagtggcgtcatctcggctcactgcaacctctctgcctcccaggttcaagcaattctcctgcctcagcctcctgagtagctgggattacaggcatgcgccaccatgcccggctaatttttgcacttttagtagaggcaggatttcaccatgttggccagactggtctcaaacgcctgacctcaagtaatccacctacctcagccttccaaagtgctaggattacaagcataagccaccatgcctggtctattttatttatgtatttattttattttatttttttgagacagagtctcactctgtcaccctggctgcagtgcagtggtgcgatttcggctcactgccacctctgcctcctaggctcaagtgatcctcccacctctgcctcccaagttgctgagactacaggtgcacactaccatgcccagctaatttgtggagtttttgtagagatgaggtctcgatatgtagcccaggctgctcttgaactgctggactcaagcaatcttcctgcctcggtctcccaaagtgctgggaatacaggcatgagccactgcacccggcctgttttttttttttgtttttgttttttttttttatggaggtgagattgacatgacataaaatagacccttttaaagtgcatggttcagcgccatttagtacattcactacgttgagcaaccatcacctctatctagttccagaatgttttcaacaccgcaaaaggaaaccccgtcctcattaccactcattcctcattcctcctccccagcccctggcaaccaccaatctgttttctggctatgaatttgcctattctggacatttcatataaatggaatcgtgcactatgtgaccttctgtgtctggcttctctcactcagtatcatgttttcaaggttcatccaccctgtagcatggatcagagcctcgttcctttttatggttgaattaaaaatcgctttttatggtaattgtgaaccgtgctgctatgaacatgggtgtataagtatctgtttgaggtcaggcacagtggctcatgcctggaatcccagcgctttgggaggctgaggtgggcagatcatttgaggtcaggagtttgagaccagcctgaccaacacggtgcaaccctctctctactaaaatacaaaaattagccgggcatggtggtgggtgcctgtaatctcagctactcgggaggctgaggcaggagaatcacttgaacccaggaggtggaggttgcaatgagctgagatcgcgccactgcactccagcctggacaagagtgagactccatctcaaaaaataaaataaacataagtatccatttgagtgtctgccttcagttttctcaggtgtatactcaggagcagaatggctggatcacagggtcactctacacgtaactttttgaggagccgcaaactgttttctatgcctggaaagaagtgaaagggagacctccatccaagggacagagccctggggatgggttgattctcaccaatgctttcccatcgcttctttctgggactggctgggaccgtcagtgccatctgtggccctatttctcgggaacccacaagcccacaacagaagaggcccagaggcatgcggaggggttgacccgggtgggcacccagcctgaataagcccccttcctcccctggccttccccacccatcgaaagtcaagggaaggattctgagacccccgtcctcacagtgccccccagaagcctgaccccatccttatcgggacatcagcaccaccccgctcagaagactttgcaaaatggggaagacactgagagctgcaagaaagtgacaaaaatgccaccaagtgtcacacagcgttcccagctcagggcttcttgttggctgccaccagttccccacccccacagccacccctgagctgttcccctcccccaccctactctcctttgcttcctctaaacgcttctccttaaaacctttaaacattttaaaattcttttttaaatatttgtatagagcctcaggtttatagaataaatgaaacaatgcaattcttgggaccatcggtctatccatgatcagctttattttacttacttatttactgagacagagtctcactctgtggcccaggctggagtgcagtggtgagatcatagctcactgcaacctcaaactcccaggctcaagagattctcccacctcagccccctgagcagctgggattacaggcacgtgccaccactcctggctaatttttgcattttttgtagagactgggttttaccatgttgcccaggctggtctagaattcctgggctcaagggatcctcccgcctcagcctcccaaagcgctgagatcacaggcatgagccactctccctggcgcattttatcttccttgatacaaactcttttcagaattctctgtttttgctttggtctctgataaaatcacgtctgaatataaccgcaaaacaccacatgcctgcgttacatggcgttatgttaaacagccatcattttggctgggtgcagtgatccatgcccatctctactaaaaatacaaaaaaattagccgggcgtggtggtgcgcgcctgtaatcccagccacttgggaggctgaggcaggagaatggcttgaaccggggggcggaggttgcagtgagccgagattgtgccactgcactccacactccagtctgtcgacagagcaagagactctgtctcaaaaacacacacacacacacacacaaaacagccatcattttaggaaacgtttatacctggaaacttctgtgtgtattattcacaatttgcgggaataaagaattttactttgcaagaaaatatgtaaattaaaaaataaaagggaaggaaggcatacccatgagcctccctcttcaccaagaactgagatatgaccttgttcccatgctcccatgtttatcttgctgattaccaccactccgaatattctttgccccttattcctttgctcagttacttaattttttttttttttttgagacagagtcttgctctgtcacccaggctggagtgcagtggcgtgatcacagctcactgctgcctcgaattcctggcctcaagccatcctcccacttcagcctcctgagtagctgggactacaggtgcgagtcaccacacctggcaaattttttatttgtatttttggagagatgggggtctcactatgttgcccaggatggtctcgaactcctgggctcaagcgatcctcccaccttggcctccccaagtagctgggattataggcatgagccactgcgcctggcccagccttgtttatttttatttatttatttattttattattattgtttttttttgacacggagtcttgctctgtcacccaggctggagtgcggtggcgctatctcagctcactgcaacctccgcctcctgggttcaagtgattttctgacctcaggctcctgagtagctgggattacaggtgcctgccaccacacctggctaactttcatacttttagtagagatggggtttcaccgtgttggccaggctggtcttgaactcttgacctcaggtgatccgcccgcctcagtctcccaaagtgctgggaggttacaggggtgagccactgagcccggccgccttgtttatttttcaaagtcttcttgcatatgtttgtatcctgaaaccaaatctcgttttatgatctttgtgtctgagctttttcgcaaggtggctttttcctatggggctttggagactttttcaagattctactgtggaatctgtcacgctgcaatttaagatttttttctcctgacttcactaagtttttaaattgaagaaagaggtgtggctaggcatggtggcatgcacctgtaaccccagcattttgggaggctgaggtgggcggatcacttgagggtcaggagatcgagaccagcctagccaacatggtgaaactccatctctactaaaaatacaaaaattagccaggcgtggtggcgtgtgcctgtaatcccagcttctagggaggttgaggcaggagaattgcttgaactcaggaggcggaggttgcagtgagccgagatctcgccactgcactctagttcgggcaacagagcaagactctgtcccctgccccccctcaaaaaattgcacacccctggagttattttttcacagctgtataatattccaagtgctttataaagttaccgctgaggaagtgctagggttttattaatgacttaatgaccatcatgttcatagattgctttgaaggattaatgatgcccttttaagcatttcacccttttcttcctccttactgccccaaatcttggtgatctctgggaggggccaagactggggacacttttgggcccagctgcccatgaggaccccacttctgcttcggccacttctgctcagctatcctcgaggttgcttatataccatctatttataaccccgcccccccaccccacgtcacccgccccctgccagggcaaccagtgaactcagtgtccatggggaaggggaagtgggttactaggtgctagagtttgtttggggtttgggggtgcctctgctgcttcctgaagggcttcatttcctagaagctgagaacactgagctgacagatcaaccccccttccttcccacagtgggtcatggggccaaggaggaagaagaggaaccaggtgctggcaccccaggtcgcaaacacatgcactccccctcagccccggagcacggggcctcgttgccttgtccctctgagccatcgcggcctctcgcttctgccctctttatgtttgggctcctcctggacttcccttcagcaccagagacccctgcagcccagaccccaggagactaagaggcctgggtggtctctgggatgggcggggaggcacacatgtgcaggactggctcttccccactctgctccagggccgaggccccaaatagctggacttctatatttagaagctggctcagcagcaccagggaactataaatacagcccagatcagtgcagcctccaaaatccccaggccaggctgggatgagtagggagcaaggagttagggagatgtcagtggggccagatggggtctgcagtgagggccccctgggccaggtgcacactgacaggccaggctcccggaaacccaggtgttcagcctgctggaggagacaaacagaccatagtgggacctgcccccggtgggggatcagggttggccagcgggcttcccaccctctttcccgttctctggggcttcctggcacagggacagctgtctggtctcacaatagctgcgccgccctcctggagccagctgcggggctcatccgtgtgggggctgcccggccccttcctctgccattgtctcccagccagggggcatcctgttatgcccccctccacccggagaccccatctgaccccccgcctcagcccaggcttgtgcgggtgctgggcaagggctggcggcataagaagccggggagtggggcgttggggtctcctggtgtccctccctgttgcagagggcagcaaagagacagttcaccccgctctgggatcatcctaaccgcggctcctgttgtttattgagcgtccatgcccacctacacttctgcaatgcgttccctccagtctggtcctcacgggcacctggagaagttctgaccatttcacagatcgggaaactgaggcccggaaaggccacatcacctgcctgagaccacacagcccaaaagggagctctgggcgtggtggcttatgcctgtaatcccagtacttttggaggctgaggagggtggatcacctgaggtcaggagttcgagaccagcctggccaacatggggaaaccccgtctctatcaaaaatacaaaaaaattagcctggtgcggtggcaggcgcctgtaatcccagcttactcaggaggctgaggcaggagaatcgcttgaacccgggaggcggaggttgcagtgaaccaagatcgcgccactgcactccagcctgggcaacaagagcgaaactccatctaaaaaaaaaaaaaaaaaagtaaaaaaagttagccaggcatggcggcacgtgcctgtattcccagctacttgggaggctgaggcgggagggtggcatgagtccaggaggtgcagtctgcctcaagccataattgtgccactgagttccagcctgggcaacagagaccctgtctctaaaataataataataaattaggctgggcgtggtggctcacgcctgtaatcccaacagtttgggaggccgaggcagtcggatcacctgaggtcgggagttcgagaccagtctgactaacatggagaaatcccatctctactaaaaatacaaaaaaaaaaaaaaaaaaaagaattagccgggtgcggtgtcagatgcctgtaatcccagcttactcgggaggctgaggcaggagaatcacttgaacccaggaggtggagggtgcagtgagtcgagatcgcaccattggactccagcctgggcaataagagtgaaactccgtctcaaaaaaaattatactaatatattataattatattataataattattatattatataatataattattattattatattatataatataattattataattatattataataattattatattatataatataattattactatattatataatatattataatgttacatattatatattataattattatacgattataataattattagattatataattatacgattataattcttagattatataattattattatatgactataattcttagattatataataattatattatataataattattatactataattatattatataataattattatacataataattctattatataattattatcatactataataattatataatataattattttatactataataattatattatataattattattatactataataattatattatataattattattatactataataattattattgttggttggataatcttgggttgcttctttttttttttttcttttttttgagatggagtcttgctctgttgcccgggctggagtgcagtggcgcgacctcacgatctcacgatctcagctcacagcaatctacgtctcctgggctcaagcaattctcctgcctcagctgcccaagcagctgggattacaggcaatcttgggttacttctgagctgagcaacctggggccagtggctcaaaacgcccaggtgccagtttcccttttgacaaatgaggaccatgttcccgcccctcatcattgcagaacaaaagtcatgaggttgtccagaagctgcaaaataggtcagcaggactgagacttcaggacaaagagaaagtggagaaacataggcagacgccccggcagggaccagatcagcgaggctgaaggaggcttcctttagctgggcggcagcggagtggagtggcaggagtactactaatttgcatggtttaccatatagggccccactcagcacaggctctgtgctggtgctctgcagagaaaaagacaaaagtcactcagggggctgacagcctaatgcggctcgagggcagattgttgcaagggaagaagggagatggtgagaagtattggagagactcaagaaagccgccaggaatggtgactcacgcctgtaatcccaacgctttgggaggctgaggcgcgtggatcatttgaggtcaggagttcgagaccagcctggccaacatgatgaaacttcatctctactaaaaatacaaaaaactatccaggtatggtggtgcatgcctgtaaccccagctgcttgggaggctgaggcaggagaatcgcttgaatctggaaggcggaggctgcagtgagccgagatcgtgccactgcactccagcctgggctacggagagactctgtctcaaaaaataataataatgaaaataaataaataaaaattaaaaaatgaggacctggttgtgctcacctggaatcccagctactcgggaggctgaggtgggaggatcgctggagcccagcagtttgaggctggaatgagctatgatcgtgccattgcactccagcctgggcaacagcagactctatctctaacataaagtaaaataaaataaaataaaataaaaaagtgtcgatgatcactatgaaggggtgtagggacaatccctggcatcaggaagcgcctcctgcctccctgagattctgcagacaccagctgtctgacgtgcccatctgatctgcagagaagggacgttgagccctggggttctagctggagtttctgactttctgagaaaaaaagggcaaaatccctccagagctggtctggccctctctccttccagcttctgctggtgttcattcccctcccccacagcccaggccacccccacaggagcccaggacaggaaggggtaaattctaggactggggatgtttgattattcccaggacaatagttctgtgacttcagtgattagtgactttttttccccatcgctgcaatctccccctttgaacaattgaactatattttgcttagcattcatcacttctgcatcttgaatttattcatgtaacaaggagacttgatttcggcatcctcactgaaaaaccctcctcattgccccaaatagtagggaaacctaaaaataaatgtgaatataaggaactcaaaaccaagtccttgaattctggctggacacagacgcctgctaagcctcagggtcacggaggcgctaaagacatgttagtgcccagtagagactttcccctgggctcattgtagggactctggggctgggctgcccgcctatggatcttctcagctgggtaggtcacttgtgcctcagtttcctcctctgtcaaatgggaatgacaacatcattgcagatgttttgaggagtaaatgagttaaaatagattaaaaaaaaaacaaacttatgaccaggcctggtgcagactaagtgctctataaataatagcattttcttggcagcatagcgagagcttgtcttaaaaaaaaaaaaaaaaaaacttaagaaaaaactagccaggcgtgatggtgcacagctgcagtcccagctcctcaggaggctgaggcaggaggatcctttgagccctggagtttgaggctgcagtgagctgtgatggtgccactgcactccagcctgggtgacagagtaagatctcttaaaaatatatatagcgtttgtttgtttgtttttagacagtttcactcttgttgcccaggcttgagtgcaagggcacaatctcagctcaccacaacctccgcctcctgggttctatcagtcctcctgcctcagcctcccaagtagctgggattacaggcatgtgccgccacacccggctaattttgtatttttagtagagacagggtttctccatgttggtcaggctgagtctcgaactcccgacctcaggtgatccacccacctcagactcccaaagtgctgggattacaggtgtgagccaccgcacccagccaaaaaatagcgttttaaaaaattatgaggtagctcaagagacaagctaatcatgtgatttatccagaaaggaaagaaccctcctatcacatgattctctgttgattaacgaagaggcctctgaaatataagtttcccacagggggaaactggcttagaaagatcagaaagatccaggaggtctgctctgtgcggtgaagcttctcttcttggcacctgcctggcatcggaagagggccccttctccctccctgggcttttatgtggacactgtaatgcctcagttttctttctttctttttgtttttgacacaggatctcactctatcacccaagctggagtgcagtggcaccatcatagctcactgcagcctcaaactccccagctcgggtgattctccccgcctcagcctcctgagtagtagtagctgggactacagatgtctgccaccagcctggattatttatttatttattttgtagaaacaagagtttcgccatgttgcccaggctggtgtcaaactcctgagctcaagcgatcctcctgcctcggcctcccagagtgctgagatcacaggtgcgagcctctgcacccgacctgtttcctcatctggaaaatggcagggaaacgttctgccagctgggacgcaggctctgccaactctggcatgccaaagctctgggcacagggcgagtcccaccagcgtgggcgtccagagctatttctgacaagacccctttgcgcctgcccagggaagagccaagtggccccaggcaagaccgccccgcccggctgccacaccttcccctcagagcagccagccccaacacagaggccaaagggttcgtcagagccacatggtggaaactctagcagagggtttttgaaagcaggttgcacttcattcttactgagtgcacgtgtgtgtgtgtgtgtgtgtgtgtgtgtgtgtgtgtgtgtatgcagcgcccctgggtctgtgtttttattgcactttcctgctggcttccagctgcaccgccagttccggggagggccctgggccagcggctgtccgccccccctccttcataaagtcctggcctcgggacagcctgcacagctgcctagcctgtggagacgggacagccctgtcccactcactctttcccctgccgctcctgccggcagctccaaccatgggaggccgcgtctttctcggtaagtactttggggccccgctgggaggggcgaggaagctccagcgggaccccttggctgcgtctgagaaacgggaggcgccgctggtgtctgtggggcctgcgatagaggaagccacatggtcaagcaggcactcacgggcacacggcgagaggggctggtggtgcttgggcacccccacaccccggcaggaactccagggtgctcttggagcctgctaccctgcctggagggatcctcaagctttctactggagccagtctggcatctgctccctaagaggggaaactgaggcacgggggaaggaaaggggcaaaaagtgagtgctgggaccctgagagccgctgtgcttaatataacgcatagaaggacatgggcgggggtggggaagctagaagccaggacttctccactgcaaggtacccccaatttgtccctcgcagtctcagcagcaggggcagcccccagagaccccagttcttgctccccgcagacctggctggggctcagctgcggatcgaagggactttgcctggttctgggtttgaatttgatttttgttgtgacttcctgggactccctttcccgccccacccaaggtgactgtaacggttatcagggtagctcgttgcctaagcaacggggcaacaaagagagtgaagaaatgacatttggggcaaaaaccagaacttcctggaccacagggacacagcttccctgggccagccccaagtggcaggtgtcagctcagcaccccgccttggcttgagagtgagagacaagagcccaccttgggtttcttgggggcacacttgttgggggcagttgccaagacctggcttcccaagggttccacgccctggctgtctgtgtcaccagggccaagtcagagagcctctgcgcctcacttttctcatctataaaatggagcacaacccgtctccgtcttagattgttttaagggatgagtgagttaggacacaaactattcctggttcacagtaagaattaggtaaacagcattttaaaagtgttggctgggcacagtggctcacacctgcaatcccagcactttgagaggccgaggcaggtggatctcttgagcccagggactggagactagcctgggcaacacatcgagacgttgtctctaccaaaaacaaatttttttttttttttttgagacaaagtctcgctcttgtcgctcaggctggagtgcaatggtgcaatctcggctcactgcaacctccgcctcctgggttcaagcgattctcctgcctcgcccccatccaccccgagtagctgggattataggtgcctgccaccatgcccggctagttttttgttttagtttttgtgtttgtatttttagtagagacggggtttcaccatgatggccaggctggtctcaaactcctgacctcaggtgattcacccgcctccgcctcccaaagtgctgggattacaggcatgagccaccgcgcccagccaaaaaaaattttttttaattagtcgggcttggtggtgtgcgcctgtagtcctagtggctcaggaggctgaggtgggaggatcccttgagcccaggaggttgaagctgcagtgagctgtgtttgcaccactgcactccagcctgggtgacagagcaagatcctatctcaaaaaataaattaataataaggccgggtgcagtggctcacacctgtaatcccagcactttggtaggcccaggccagcagatcaccagaggtcaggagttcgagaccagcctggccaacatggtgaaactctgtctttactaaaaatacaaaaattacctgggtgtggtggcgggcgcctgtaatcccagctactcgggagcctgaggtaggagagtctcttgaacctgggaggtggaggttgcagtgagctgagatcacgccactgcactccagcctgggtgacagtgagaccctgtctcaaaataaatgaataaataataaattatgatgattattaaattctggtaagacactagtgggtctggggaattgtctcggggtccttaggaggaagcctaaagaaggggtgactgccccaccaccccccaccccaggatctcaatgcaggaaactgactacttagggctcagcccagagaatgcaaaccagaaggaactcaaaccagaacagcagcttctctcccggcttctgtttgggcaacttccaaggccccagatggaggcagctgggccctgtagcctcacggtgggagtagagaacccagctcagcccatgcagaggggatggggcacaaaggaaccctgcccagggccctgaggacctcaatccctcaattcctccttccccaacctcttctgtttattggattcctcctgatccttttctgggctccaagcctcagtttctctatctgtagaatgggcatcaacacagcccctgcctcctagagtggttctgagctttaaaggagttacctggggctttgggagttagagatgaatctgcctagatcctgtcctgccaggggaggtcattttgtggtctgttctgcaaagaggaactgggttctggccgagggaggaactagccaagccttgtggccagagaggaggaagaggggaatcctgacagaagtggggagtacgggcttgggctggggggtttcggccttggtttaacccagctggaaggagtgtggaggtgggagtggggatctctgccttccacccacctaaggggtactaaatttgaacacagtggctgagtggtccggggacctccaatctgcaccccaaacacccgccctctgaagctgtgctcataacagaccccaaaattcccctggaagcccctccagggttgaattggggcaaatgagtggtgagtcattccttcccttaggcccaggaagtgactcatgcccagccgttgtcctggtccccatccctctgcccgacaccccccttcaggtctccctggattattggggtccccagtattcccagatcggcagggactggacgtcccctcccagcccgccccaggccccacctgccgctcatatcccaacgccctccgttcccctgcccttcccctctgtttccatccaccctcctttctcatggttttctttcttcctcactgtttatctctctgtctctctgttctctctgtcccatctcctcctgtttccccttctgctctttatgggccccttgtttctctctccacctctctctatcaccatgtaatttctgtctctctgtctgtctctatctctccgtgtctctgtctcctctgtcttatatttctctagctgtcttctttctcctctctgtctccctctctctctccagcttgtctcctttctcctctctgtctccgtctctgtccctctatctctctgtctctctctctctttgttcttttcttttctttcttttttttttttttgagactcttgctcttttttttttttttttttttttgagagtcttgctctgttgcccaggctggcgtgcagtggcgggatctcagctcactgcaacctctgccttctgtgttcaagcgattctcctgcctccacctcccaaatagctgggattacaggcgtgtgccaccatgcccggctaattttttgtatttttagtagagatggggtttcactatgttggccaggctggtctcacactcctggcctcaggtgatccatctgcctcggcctcccaaagtgctgggattacaggcgtgaaccaccaagcacagccccccaccttctgtctctctgtctctttgtgtctctgtctctctttctgtgtctctctttctttctgactctttctctctctctgtctgtctctctctctctctaatctctattttctctccacccctgcttctttgtctctatctctctggtgaacagcaaggagatccctaggtccccatctctgaatcccctggtgacctgaggagggtcccccagaacatgccttgggagggggaaccccctgagtgctgggaaccgccactccacgtgcaccccaacaggcggctacagcgtcttcctgtgggaggggggcccgggggtgaaatatcaccactgggttccaggacagaccgccagggccagtggcagttgtgggtgtggtgtgtgtgcacctgtgtccctgaggaagcgtggaggtccagggcatctcagagcctgggtgatccaacaccgtcatttttttttttttttttctgagacggagtcttgctctgtcactcaggctggagtgcagtggcgtgatcttggcttgctgcaactctgcctccttagttcaagcgattctcaagcctcagtctcccaagtagctgggataacaggcacccaccaccacgcccagctaattttttgtattttcagtagagagggggtttcaccatattaggcaggctggtctcgaactcccgatctcaagtgatccacccgcctcggcctcccaaagtgctgggattacaggcatgagccactgtgcctgaccacgccttcatttttacctaaagaaatgaagatggcaggcagggcctggcggcttgtgccagcactttgggaggccaaggcaggtggatcacgaggtcaggagatcgaaaccatcctggctaacatggtgaaaccccttctctactaaaaatataaaaagttagccaggcgtggtggtgggcgccagtagttccagctactctggaggctgaggcaggagaatggcgtgaacccgggaggtggagcttgcagtgagcagagatcacaccactgcacttcatcctgggcaacagagcaagactccatctcaaaaaaaaaaaaaaaaaaaaaaaaaagagaggccgggcgcggtggctcacgcctgtaattccagcactttgggaggctgaggcgggcggatcatgaggtcaggagatcaagactaccatcctggctaacatggtgaaaccttgtctctactaaaaatacaaaaaaataagctgggcgtggtggcgggagcctgtggtcccagctactcgagaggctgagacaggagaatggtgtgaacccgggaggcggagcttgcagtgagccaagtttgcaccactgcactccagcctgggcgacagagcaagactccgtctcaaaaaaaaaaaaaaaaaaaaagagaaatgaagatggcaggctgggcacggtggctcacgcctgtaatcccagcacttttggaggccaaggcgggaggatcacttgaggccgggagttcaagaccagcctggccaacatggtgaaaccccgtctctacaaaaatacaaaaaaatcagccgggcttggtggcgggtgcctgtaatcccagatactctggagactgaggcagaggaattgcttgaacccgggaggtggaggttgcagtgagccaggatcgtgccatcgcactccagcctgggcgacagagagagactctgtctcagaaaaaaaataaaataaataaataaataaaagaagaagaaatgaagatggcagtaaatgctcaggcacaccggacagcagtcatgtggtttactcccacacacactacactggggagtgggcgccatcatccctattctacagagggaaactgaggcagagaggcccactgtctgggatttgaactggggatgcctggctcctgtctgttttcttagccactccccacacaccccaggtcagaagagcagcagctggagctgagacccccaccaggctcatggcccttccctactcagttcctgaaactccaccctcaagccgagctcgggaggctgaggcggggaggatcgcttgaggccaggagttcaagatcagcctgggcaacagagcaagactctgtctgtaaaataattttttgaattatttttaggccggccacagtggctcatgcctgtaatcccagcactttgggaggccgaggtgggtggatcacgaggtcaggagatcgagaccatactggctaacacagtgaaaccccatctctactaaaaatacaaaaaattagccgggtgtggtggtggacgcctgtagtcccagctactcgggaggctgaggcaggagaatggcatgaacccaggaagcggagcttgcagtgagctgagatcatgccactgcactccagcctgggtgacagagtgagactccgtttcaaaaaaaaaaattatttttaattttttggcctggcatgataaattattttattttaaaaattttgagtcaggaaatgtggctcacgcctgtaatcccagcactttgggaggccaagacaggcagatcacctgaggtcaggagttcgagaccagcctggccaatatggtgaaaccctgtctctagtaaaaatacaaaaaattagccgggtgtggtggcagactcctgtaatcccagctactcaggaggctgaagcaggagaatcacttgaacccaggaggtagagattgcagtgagccaagatcacagcattgcacttcagcctgggcgacagagcaagactctgtctcaaaaagaaaaaaaaatttagtgcacacctgtggtcccagctacttgggaggctgaggcaggaggatctcttgagcctaggaattggaggctgcagtgagatatgattgcaccactgcactccagcctgggtgaccaagcaggagcctgtgtcaaaaaaaaaacaaaaacaaaaaaacccgcccctatgggaacagggtgacagactctttggctttgagcatctgagtgggacatgacatctgctcactctgaacgaccgtcaggatctgagcctgagaggggtcagcatcctcctcccacaaagtgcatcacccttacgcctcctttcccaccctgggatcccctctgaccccctttcctttctctgttgcagcattctgtgtctggctgactctgccgggagctgaaacccaggactccaggggtgagtctgctgggaagcagaaagcacagtccacagccagagcctggggagggtcctggacccccgcccagcccccttcagcccagggaaagagagggctcgcgcacgagaaactcagcgccctgccccatctcccccagtgccccctttttgtgtattcccttacccctcaccttctgaccgtgctccctgctcttgcaggctgtgcccggtggtgccctcagaactcctcgtgtgtcaatgccaccgcctgtcgctgcaatccagggttcagctctttttctgagatcatcaccaccccgacggagacttgtgacggtacagaggcttgagggcagcgcaggggacatccgcgattatgaggcattgcccagccagtgggggacagaggttgttgtgaggggccacagccttaccttccagactatcatcatggccagagaaaagaaaaagagggcaggcgtggtggctcacgcctgtaatcccagcactttgggaggctgaggcgggcagatcgtttgaggccaggagtactcagaagactgaggggagaggattatttgagcccaagagtttgaggctgcagtgagctatgattgcaccactgcactctagcctgggcaacagaatgagatcgtgtctcagggagagggagaggaaggggaagagggagagggggagaggaaggggaagagggagaggggtagggggagggagaaggggaggggaagggggaaagggagggggatggggagggagagggggaggggaagggggaaggggaggggaaggggaggggaagggggaaggggagggggatgggggagggaggggggaaggggaggggaaggggagggggatgaggagggagacggggaaggggagggggaggcagagggagaggaaaggaggcaggaaggaaggaagggaggaagggagggagagagataggcccggcatggtgggtcatgcctgtaatcccagcacttcaggaggccgaggtggacagatcacttgaggttgggaattcgagactagcctggccaacatggtgaaacctcctctctatactaaaaacacaaaaaattagccgggggtggtggtggtcacctgtaatcccagctactcgggaggctgaggcaggagaatcgcttaaacctgggaggtgaatgttgcagtgagccgagattgcgccactgcactctggcctgggcgaccagagcaagactttgtctcaaaaaaaaaaaagagagagacagagaaggagagaaagagaaagaaaagtaggcccggcatggtggcttacgcctgtaatcccagcagtttgggaggccaaggcgggcggatcacctgaggttgggagttcgagaccagcctgaccaacatggagaaacctcatctctactaaaaatacaaaattaaccgggtgtggtggcccatgagcacatgcttgtaatcccagctactccgggggctgaggcaggagaatcgcttgaacccgggaggcggaagttgcagtgagccaagaccgtgccattgcactccagcctgggcaacaagagtgaaactctgtctcaaaaaaaaagagaagaaaagaacaagagagagagggagggagggagggaaagaagagggagggagggaaggagggaggaaggaaggaaggaaggaaataagggaagaatatgaagggggagaagtaagaagtgaataggcatggcttcctggagagagagaagctgggtgctcaggaatctggagtctgtgcctcagtttacccttaagactggggagggggtacattctggctatgaggtttttttttccttttttttttttttgagacagagtctcactctgtcacccaggctggagtgcagtgacccgatctcggctcactgcaacctccacctcctaggttcaagcgatcctcctgactcagcctcctaagtagctgtgattacaggcatgcaccaccatgcccagataatttttgtatttttagtagagacggggttttgccatcttggccaggctggtctcgaactcctgacctcaggggatccacctgcctcagcctcccaaaatgctgggattacaggcgtgagccactgcacccggccgccatggggtttaaatttctacaaagagactggggatggggatgtggagcttcctgtccatccctcacctcagcactgttcactgtgtccaaatctaagatgccagccagagaactaagatcaagtgtggtcttcaggaatggcttgctccagctgcagcatagcctgtgcagtgcaacttaagattttttccaaaagatactaagcagcaggccccatgttggggagtcaggatgggggtctctgccctgacagaactcacatctttgggaggtgactccctgtcctgttgtgttccagacatcaacgagtgtgcaacaccgtcgaaagtgtcatgcggaaaattctcggactgctggaacacagaggggagctacgactgcgtgtgcagcccgggatatgagcctgtttctggggcaaaaacattcaagaatgagagcgagaacacctgtcaaggtaagaaccaccccacgtcctctgactttccatccatgaggtttggggtcaccagagccattctggcagcatccagagagcagggccttggttgtagggtcagtgcctggcgtctgagatgggacaggtgcacatgtacctaccccaccaccccagagaggcagagtgatgtgaggattaagggctgactctgggaccagctgcctgggccaaatcctgataaccaagtgtatgacgttggccaggatacttattcagaaaccgctgtccacatgtgagatgtgataacgttatcatgcttgtaattccagtgctttgggaggctgaggcgggaggatctcttgaggccaggagttcaagaccagcccatagcaacatagcaagaccccacccctataaaaggggaggcgaaggcaggtagattgtttgagcccaggggttcgagaccagcatgagcaagcgggtgaaaccccatctctacaaaaaataccaaaaaaaaaaaaattaattagccaggcatagaggcctgcgcctgtagtcccagctactcaggaggctgaggtgggatgattgcttcaggctgggaggtcaaggctgcagtgagccatgatcaagcccctgcactccagcctgagtgacagagcaagatcctgtctctaaaaaagaaaaaatcaaaccaaagctttcttggaggcaggattttaaaaaattaaaaacattaaatgaaaaaagaactggccgggcgcagtggctcacacctgtaatcccaacactttgggaggccgaggtgggtggatcacaacgtcaggagtttgagaccagcctgaccaacatgatgaaacccccgtctctactaaaaatacaaaaattagccagacatggtggcacgcgcctgtaatcccagctaccagctactccagaggctgaggcaggagaatcgcttgaactcaggaggcagaggttgcagtgagccaagatcgcgccactgcactccagcctgggtgacagagtgagactctgtctgaaaaaaaaaaaaaaaaaaagataggttgggtgccatggctcatgcctgtaatcccaacactttgggaggccaaggtgggaggatcacttcacttgagtctgggagttcaagaccagcctgggtaacatttcaagaccccatctctacaaaaacaaaaatatagacaaggggaagaaagagtccttatcttttatttgttttgtttgtttgtttttgagacagagtctcactctgtcacccaggctggagggcagtagtgtgatctcggctcactgcaacctccgcctcctgggttcaagtgattctcatgcctcagcctcccaagtagctgggattacaggcgtgagccaccatgcccaggctgagtccttatcttttaaagataaaaacaaaagtagctttgacttttgttaaatatagaccttggacaggttactttcaccttgttaaaaggttaaagttactttcaccttgctaaaaggggagtaatggcatttacctacaaaagtatttaacaggctgggcacagtggctcacacttgtaatgctagtactctgggaggccgaggcaggtggatcatctgaggtcaggagttcaagaccagcctggccaacatggcgaaaccctgtgtctactaaaaatacaaaaattagctgggtgtggtggtgcatgcctgtaatcccagctactcaagaggctaaagcacgagaatcgcttgaacctgaaaggcagaggttgcagtgatccgagatgacagcactgcactccagcttaggtgacagagcgagactccatttcaaaaaaaaaaaaaaaatggctaggcgcgatggctcatgcctgtaatcccagcactttgggaggccgaggcgggtggatcacgaggtcaggagatcaagaccatcctggctaacacagtgaaaccccgtctctactaaaaacacaagaaattagccaggcatggtggccggcatctgtagtcccagctactctggaggctgagtcaggagaatggcgtgaacccgggaggcggaggttgcagtgagccgatattgcgccactacactccagcctgggcaacagagcgagactccatctaaaaaaaaaaaaaaaaatcacttaaaagctcctggcttgcagaatgcactctatcagcaatggctaatggggattttattgtaattctgatctgatgcgcccccaggatgggtatccgtagggtgcgagatcagagagcagctgcaaggctctacccctgcgcagaggccacagcctttgctatggtcttgcttgaggccacagctcaggccgggagaaactgggactccaggctttgcctattttccagggaagctggttgggcaggggaggggcttccaggattcacaggggcagatgggagccagcagtgggcagctgggagctgcgactcattcaaagagagggagttagtgcagggtaccgagatcaggaagaggagtggtgcagaggtgggaggtgatgagactcaagactacagagagaagaaagggccggcagcccagatcccagccccacccctcctgccctgcattcaggcagagcacagagggataaagagggaggtgggttgggggacaaggcagagatgcatatacctgggacgtacacctgcgtggagcccagaaggaggcttctgtccgccacactgctagtccccagggcccccttgcaagtggacatcatgttaccccacatgcatgtgacttggccagaggagacagagtcttcatgtgaactggaaaaagatccccctctcccggtggatacatttgacaaacaaaaagtgggctggttttcagcccctgctcatctcattggcccaatacctgtgcagtgagcaacctgcacagctgtacttggtgatcatggtttcctcccagggtgctctggctaggggtgccgcccacccactgctatgaaccccctgcatgggatggtggttgtggttatgaaggaggtgtgttgctgtgttagaaacaggcctgggctgagagaaggggactcagtcaggcagctgggcagagacatggacagcagggctgaggtgataagagggacctccacggacatcaaagcaggtgatggagccaacagcctgctggtttggagcaggacctatgaccagaggtgagacgctcagaggggcctgggcccctccctttaacccaaggcactccaggcttcgctattgcacctgaggacacgtgcacccagtgtcacagcccatggggcctgtgacatccaggccagagacctcgggcggctccctccactcctcacccccctgtctccaggcatctcagggccatcctaaacccctgatcacccgtctttgtcccaaccctgagactcgggacactccacaggaggccactttggaagctcggaacatccccctgcccatctggcatcttatttgcataaaacaaaagggggctggcactcaggatatttcatgggctcatgacatggcgtgtggtggcgcattccagtacagtatccatcctctccgccatcgccggggactgccaggatgagacttgctgccaccggggctcccatgagctcagccacacctggaacccctctgacacccacacctaccataatgaaccccaaaaccctgtccagaaactcaggaggagggaatctcaaggacaggacaactgtctccagccagcagccttgcttggagaagatgcctcccgaccacctttctggccgtttagccctcatccatttccccatccaaggctccaccctaacccaccctggtaattcctgggcctgaacgcaccgtcaatgaccaaagcttgggaggatgctgtggccaggtgtgggcagcgtgatgtggaccccacaaatggattcagagggctgggtgccgtgactcatgcctggaatcccagcactttgggaggccaaggtggaaggatcacttgaggtcgggaattcgagagcagcctgaccaacatggtgcaaccctgtctgtactaaaaatacaaaaattagccgggcgcagtggcacgcacctgtaatcccagctactcaggaggctgaggcaggggaatcgcttgaacccgggaggcagaggtcgcagtgagctgagatcacatcattgcactccagcctgggcaacagagagagacgctgtctccaaaaaaaaaaaaaaaaaacaaaaacgcactcagagggttggatgaaggaggcggctccagcctggactagccggcaagagacagcatcactggggaccatcgtcccaggcccgatcctctcctgtagtcagtcctggtctggaccactcaaggacagagatggaagcttgaaccccattcagcagggcccacaggtctctgtccctggtggaatgacaagggatgagaggacagatacatctgccacccctcacccatcggcacctgtgccctctctagccacaggcccccgctcacggccagttctgcttagatatggattctcaccaaatcctgctatttccatatccatagatcctttcctggggatcagaaaaaagcatctttgtagactcggggctgcctggctggacatcagcccccactgttcaccccagcctggtgcccactgtccgggcagccctagcctgtcccacatcatcccgcactctccccacccctgctattgccctgcatcgcgggggcactggcttagggaggggtcttggtccatgcccatgaagctgggctctcagagctagtgtggatgggagagcagcatcctgctagggccaccaggatgctgagaatttggccagcgagcggccgttctgtgggagtcaggccgagggccaccgttgggaaccaagacgtgtcctgcccaggcgcacggcatgtcccctgcatttggttctcaggaaggccccaccctggcctttgcccggaatccttaggctgggacacagatggctgggacaccccagcttggagctgcccaggaaggcagaggagaaggggaggacttggctgcttccagccacatctggacaacagaaggactgagccaccaccctcaccataggatgcctctgtgtggattggaaaagggaggagacagtggtgccttccagatgcttccgtgccaggaaacatggcggaccctcagccctgaaagctgctcacagctacgggcatccttcaccctctccttcctcttgcagatgtggacgaatgtcagcagaacccaaggctctgtaaaagctacggcacctgcgtcaacacccttggcagctatacctgccagtgcctgcctggcttcaagttcatacctgaggatccgaaggtctgcacaggtagaggccccaggaagacgccgtgaggctggacgggagctggggatggagctgaggcacgtcctccaaagcagccgaggaggagggggaagatccgcaggttcccacaaggtcaaggacctgctaagcccctgcctaaggattcacctcccaggaaggtcctgccacacggcagggaggcggcagggccttcagggctggagtgcccttgtgggcccccagacctcaccccttcctcatctgtcacgtgcgagtggaagaaggtgtcacttccagttctaagaaggggaatctccactatgaccagggagggagcagatgagagtttttagtttttagtcatggaaatctagctcccatgactcagtttcccttttggtttcacctcctataaactggggaccatggtccctgctgtgcccatctggtaggaagaccatcataagatgctttgaaggtgaagttgaaggtcaccaagtggcggcatgtgcaataatggtcttcagtctgaggcaatgaaaagataggggagtgggtgcagtgagtggagggcaggcccaggctggtcagggacagggtttgaccctctggctttgtcctcagatgtgaatgaatgcacctccggacaaaacccgtgccacagctccacccactgcctcaacaacgtgggcagctatcagtgccgctgccgcccgggctggcaaccgattccggggtcccccaatggcccaaacaataccgtctgtgaaggtcgagagctcagatcccacgtttctagcgacccacaaacatctgatcacatgttcaacggcgcccacacaaaccaagcagaatgagcgctggaggcacctggctgtgccaggcgttcgttcattcttctgaggctagatgagaaaagagcaagggtcctccggaaggagctggggtactgagggggaaggctcagggggaccccaggcaacagctgatgactcactgggaggaaggcgtttcaccatattcataacctgctcatctgcacggggcccacctgctgtgcccaggcctctccacgcttccataacccagcgtccaccactccaaggggggcactaatgccgggaggaatgagctgggggcacagacaggagacaggaccctctccaggctgggacaggacctgacccccttcttcctgtcctcagatgtggacgagtgcagctccgggcagcatcagtgtgacagctccaccgtctgcttcaacaccgtgggttcatacagctgccgctgccgcccaggctggaagcccagacacggaatcccgaataaccaaaaggacactgtctgtgaaggtatgacctggccctagaagctccccacccccagcacacacactgacaagcggcctaatgagccgcttgtcttgttccctacagatatgactttctccacctggaccccgccccctggagtccacagccaggtgagtggcccccacagggacgaggcggcgggaactccatccacacagcactgcatccgtctccttgttctaaacttcccacccgccgtccaggctctctgacccccacatctcctctctctgcagacgctttcccgattcttcgacaaagtccaggacctgggcagagactccaagacaagctcagccgaggtcaccatccaggtaagggcaggatgctgggggaccccaggacagtgtagaatcagctagcggaggcttccatgtggccagagagagtgcccaacccaagcaggggcctctagtcagagacacacatgcgcataacatacacacaccacatacagtatgtgcacaaacatacacacccggacacgtgaagacacacgcatgcacacacacacaccaggtataatggcaacagagtgcagcacttaagaacctggagttgaggccgggcacggtggctcacgcctgtaatcccagcactttggaaggccgaggtgggcagatcacgcggtcaggagatcgagaccattctggctaacatggtgaaacccccgtctctactaacaatacaaaaaaaaaaattagctgggtgtggtggcgggtgcctgtagtcccagctactcagcaggctgaggcaggacaatgacgtgaacctgggaggtggagcttgcagtgagccgaggtcgtgcagctgcactgcagcctgggcgacagagccagactctgtctcaaaaaaaaaaaaaaaaaaaaaaagagcctggagttgggccacagaagttcaaatccccccattgccacttcttgctctgtgatctaaggcaagtgacttgccctctctgggcctcggttttctcatctgttttgggggttgtggtgtgtttttttttgtttgtttgcgttttttttttttatttggaaacaaggtctggctctgttgcccattctggagggctgtgacatgatcatggctcgctgcagcctcaatctcccaggctcaagtgaccctcccacctgagcctcccaagtagctgggaccaaaggcatataccaccatgcctggcttatttatttatttaatatatttatagatgggggtcttgctatgttgcccaggctggtcttgaactcctgggcttaagtgatcctcctgcctcggcctcccaacatgctgggatcacaggcgtgagccactgtgtctggccagtttcctcatgggcaacacaggcatgaaagtaatgcctccttcatatagtcagtgtgaagggtaaatcaactaatagaagtaagactcagaacagtgcctgacacatgataagccttatataaaagctttcctggccaagcacggtggctcacgcctgtaatcccagcactttgggaggctgaggcaggtggatcaccagagatcaagagtttgagaccagcctggccaacatggcgaaaccccatctctactaaaaatacaaaaaattagccgggcgtagtggcgggcgcctgtagtcccagctacttgggaggctgaggcaggagaatggcgtgaacccgggaagcggagcttgcagtgagccgagatcccgccactgcactccagcctgggcgacagagcgagactccgtctcaaaaaaaaaaaaaaaaaaaaaaaaaaaaaaattagctggcgtggtggtgcacgcctgtaatctcagctactcaggaggctgaggcaggagattcacttgaacccggaggcagaggttgcagtgagccaagattgcaccactgtactccagccagggcaacaagagtaagattttgtcttaaaaaaaaaaaaaacagttttcccatatgtttttagcacagtagaaaaatgatgtgagccacttaacatcattttaacttttccagtagctagattatttagttagttagttttagagatacggtcttgttttgtcacccaggctggagtgcagtggcacaatcacagctcactccattctcaacctcctgggctcaagcaatcctccctcctcagcctcccaagtattaagagctgagactacaggtgtgagccactgtgcctaattttttcattttttttttttcttttttgtgagacggagtctcgctctgtcgcccaggccggagtgcagtggcacgatctcggctcactgcaagctccgcctcccgggttcatgccattctcctgcctcagcctcccaagtagctgggactacaggcgcccaccaccacgcccagctaattttttgcattttttagtagagatgggatttcaccatgttagccaggatggtctcgatctcctgacctcgtgatccacccaccttggcctcccaaagtgctgggattacaggtgtgagccaccgcgcccagccattttttcattttttgcagagatgggggccttgctatgttgcccaagctggtcttgaatcctgggttcaagtgatcctcccacctcagcctccaaacgcactggaagtacaggcgtgcaccaccgtgcctgttgtctaataactacactttataaagtaaaaataaagttaaattaaagttaagattgcaggccgggcatggtggctcaagtctgtaatcccagcactttgggaggctgaggcaggcagatcgcctgaggtcaggagttcaagaccagcctggccaacatggtgaaaacccgtctctaaaataacaaaaaaaattagccgggcatggtggcgggcacctgtagtcctagctactagggaggctgaggcgggagaatcacttgaacccagaagtcggaggttgcagtgagccaagatcgcgccactgcactccagcctgggagacagagtgagacttagtctcagataaataaataaataaagttaagattgcatttaacctaatagatccaacgtattaaccactttaacatggaatgattttttgctttttttgttttgatctgagatcgtgccattgcactccagcctgggtgacaagagtgaaactccatctcaaaacaaaacaaaaaaaaaattacaaaaattagccgggtgtggtggcacgcttctgtagtcccagctactcagaaagctgaggtgggaggatcgcttgagtctgggaggtggaggttgcagtgagctgattatgccactgcactcaagcctgggcaacagactgagaccctgtctcaaaaaaagaaagaaaaaagaacaggaaatcaaaacagagcctggcaggcagcccgtgcccaaccagtgttaagcgctgtgattcatacgtgcatgcaggcaaatactcaatccgtcgcttgttttctggttactgcatcatctcagtgattcccttgtgcctgtgggtctccagtgtgtcccctggtagggggtgacatccaggtccttcaggcaacccctgtggtctgatgctccagcgattctgtcacccgccaccccctagaatgtcatcaaattggtggatgaactgatggaagctcctggagacgtagaggccctggcgccacctgtccggcacctcatagccacccagctgctctcaaaccttgaagatatcatgaggatcctggccaagagcctgcctaaaggccccttcacctacatttccccttcgaacacaggtgaggccttggcctggcctgccctgccccaaccctgggccccacctggtacctggggtccctaatcacaactgcccctctcccctcagagctgaccctgatgatccaggagcggggggacaagaacgtcactatgggtcagagcagcgcacgcatgaagctgaattgggctgtggcagctggagccgaggatccaggtagcagcggtggtctggagggggagcccgtgggagagagatggaggtgctgggatggggccagggtgaggttcagaatagaacaactgactgggcgcggtggctcacgcctgcaatcccagcattttgggaggcccaggtgggtagatcgcttgagctcagaagttcaagaccagcctgggcaacatggtgaaacccggtctctacaaaaaatacaaaaattagccaggtgtggtggcacgtgcctgtagtcccagttactcaggaggctgaagcgagaggatcaattgagcccgggaggtcaaggctgctgtgagctatgatcacgccaaagcactccagcctggacgacatagtgagaccctgtcttaaaaaaaaaaaaaagtccaggcacagtggctcatgcctgtagtcctagcaccctagcactttggcaggctgaggtagatggatcacccgaggtcaggagttcaaaactagcctggccaagatggtgaaaccccatctctactaaaaatacaaaaattagctgggagtggtggcaggtgcctataatcccagctacttgggaggctgagacagaagaattgcttgaacctggggagtggaggttgcagtgagctgagatcacgccactgcactccagcctgggcgaaagagcgaaactccgtctcaaaaaaaaaaaaacaaggaacaactagaaactgactcatcgggaggggctcctggcgtcatcgtggtggactggctgagcctgagctgggtcatcttgggagggaggatagagcatgggaggaggacaacgggagtaggcagcgagtgtgtctgttccccaggccccgccgtggcgggcatcctctccatccagaacatgacgacattgctggccaatgcctccttgaacctgcattccaagaagcaagccgaactggaggagatatatgaaagcagcatccgtggtgtccaactcagacgcctctctgccgtcaactccatctttctgagccacaacaacaccaaggaactcaactcccccatccttttcgccttctcccaccttgagtcctccgatggggaggcgggaagagaccctcctgccaaggtctctgctcactctgctcacttcctcaaagataacccagggccttcgcacatgctgggcctctctctgggatgctctttcccgacgtgactcagtcttttatgtttctggccttctgatttgggccttccccaacctcattacttatttatttccttactttatttatttaatttaattaattaatttatttattttaagacagagtctcactctgtcgtccaggctggagtgcagtggcacgttctcggctcactgcaatctctgcctcccaggttcaagtgattctcctgcctcagcctcccaagtagatgggattacaggcatgcgccaccacacctcgctgattttgtatttttagtagagacggggtttctccatgttggtcaggttggtctcaaactcccgacctcaggtgatctgcccgccttggcctctcaaagtactgcgattacaggcgtgagccaccactcccagactttcttttcttatttatttatatttttagacaggagggtctcactctgtggcccaggctggagtgcagtggcgcgattatagctcactgcaacctcgaactcctgaactcaaccattcctccagcctcagagttttgagtagctgaggctacaggcatgcaccaccactcccagctaatttttttatttttgatagagacggggacctcactatttttcccaggatggtctagaattcctgggctccagtgatcctcccacctcagcctcctgagtagctgggactataagcgtgcactactatgcccagttaattaaaaacaaaaaaattaatggagatggaggtctcgctatgttgccacagctggtctcaaactcctggcctcaagcgatcctcccaccttggcctcccaaagtcctggaattacttacaggcaagagccatcatcatccctggccaccttctaatgcactatctacattacttattcgttaggtttatgtcataatctgcctctcccactttttttttttttttttttttttttttttgagatggagtttcactcttgtcatccaggctggagtgcagtggctcattctcggctcagtgcaacctccacctcccaggttcaagcgattctcctgcccaggactcccaagtagctgggatttacaggtgcttgccaccaggcccagctaatttttgtattttttagtggagacggggtttcgccatgttggccaggctggtctcaaactcctgacctcaggtgatccgcctgcctcagcctcccaaagtgctgggattacaggcatgagccactatgcctggccacctctcccactcttatgtcaacctcacaagggtaggtacttgtgtgtgccctgttcactgctgtgtctccaaacctgttacattcagtaggcgctcggtcaatactcatctagtaaaaagcagccctcttagactcagcccaagcccaggacctaagagtgagctccaggccaacctttctgaccacccccatctgcccacaggacgtgatgcctgggccacggcaggagctgctctgtgccttctggaagagtgacagcgacaggggagggcactgggccaccgagggctgccaggtgctgggcagcaagaacggcagcaccacctgccaatgcagccacctgagcagctttgcgatccttatggctcattatgacgtggaggtaagtagctggaggcatcctcaagtgcccacaggtaatgaggtccagctgcaaccagacaggcagctagttctccatggagccctactggttgctcagatatatctgcatggttgcacagcccaggtgtccccacgtcacacccttcgcagcctcttcctttggcctcttctctacaacccagcaactatacactgggtgcagccactagctccgctcctctgcctgtccatcccgtaccagttgtgagatgtcaactaaaagctccccatggagagcattccaagggggcaccacttgcccgtttttttttttttttgagacggagtctctgtcgcccaggttggagtatggtggcacaatctcagctagtgaggttcaagggattctcctgccttagcctcccgagtagccgagattacaggcgtgcaccaccatgcctgagtaatttttggtatttttagtagagacagggtttcaccatgttgcccaggctagtctcaaactcctgacctcaggtgatccacccacctcggcctcccgaagtgctgggcttacaggtgtcagccaccgcacccggcctctttttttttttcttttggacagagtcttgctctatcgcttaggctggagtgcagtagtgtgatcttggctcactgcaacccccgcctccggattcaagcgattctcctgcctcagcctcccaagtagctgggattacaggtgcatgccaccatgcaccgctaatttttgtatttttagtagaggcggggtttcactatgttgggcaggctggtctcgaactcctgacctcaggtgatctgccccccctcagcctctcaaagtgctaggattagaggcatgagccaccacacccagcctggagcaccactttctgtacgtgacttcagtaggatccatcgttaagctgggccttgtcgaaaactgcaattaaccaggcagagaaggggggcgcctgtggtccaggccaaaggcccagcaagcacaaaaatgtgaaatccctagactccccttccagctggtaagtgtggccagatctaggagggacaagggaggaggtcagagaggtgggcccgtcaaagtgtgggggggaaaagggaccacaaagagggcaggaaggcctcatgccctgaaggaaccctgagcacccggtgccactcctaggactggaagctgaccctgatcaccagggtgggactggcgctgtcactcttctgcctgctgctgtgcatcctcactttcctgctggtgcggcccatccagggctcgcgcaccaccatacacctgcacctctgcatctgcctcttcgtgggctccaccatcttcctggccggcatcgagaacgaaggcggccaggtgaggtcccgccccgctccctcctgagctctggggtcagggaggcctgggaggggttagccccgcccactcccggggctcagtcgggtaggcgggccctggaggcatgaggccccgcccctgtccgggatctggccccgcccaccggggggtcgggttgtctctttaaagggcgctggctttggagctgcctggccacaccccgagtgcccgctcgcttctgagcgttgttgggggtgggccctggggggaaacctggcccccgctccagacccgcccaccctccggctgtggtcccgcccactctcgggacctggcaggcgactggctctggcgccgcatgcccctccccgcgctgacgtcgctccgcccctccgtccccgccccgcaggtggggctgcgctgccgcctggtggccgggctgctgcactactgtttcctggccgccttctgctggatgagcctcgaaggcctggagctctactttcttgtggtgcgcgtgttccaaggccagggcctgagtacgcgctggctctgcctgatcggctatggcgtgcccctgctcatcgtgggcgtctcggctgccatctacagcaagggctacggccgccccagatagtgagtgcagcgagatggggcaggaggaaggcggggtgctgggcctggggctcacaggcagtgccacacacaatgtccggccgccctccgttccgctcctggcttcctggggcactgatgggacccctcccttccctcctagctgctggttggactttgagcagggcttcctctggagcttcttgggacctgtgaccttcatcattttggtaagtacccactctccctccaccgaagcccgagcgccacaggcccaggcccggctggaccatcgctctcgccctctaacccacaatctgctccctgcccagtgcaatgctgtcattttcgtgactaccgtctggaagctcactcagaagttttctgaaatcaatccagacatgaagaaattaaagaaggcgaggtgagaggagaggctggaaggacttggaggcggggccggggtgaggggcatgaagctggaggtgaggtgggggcccacgctgcaaccccgctcctcgcagggcgctgaccatcacggccatcgcgcagctcttcctgttgggctgcacctgggtctttggcctgttcatcttcgacgatcggagcttggtgctgacctatgtgtttaccatcctcaactgcctgcagggcgccttcctctacctgctgcactgcctgctcaacaagaaggtgggggcctgggcacagtggcgcacgcctgtcatcctcccacctatttgggaggctgaggtgggaggattgcttgagcccagaagttggagaccagcctgggcaacataaccagatgctgtctttacaaaaaaattcaaagatagccagggtgaggcgcctgtaatcccaacagtttgggaggccgaggtgggcagatcacctgaggtcagtaattcaagaccagcctggccaacatggtgaaaccctgtctctactaaaaatacaaaaattagccaggcatggtggcacacgcctgtagtcccagctacttgggaggctgaggcaggagaatcatttgaaccaggagtgcagtgggccaagatggcaccattgcactccagcctgggtgacagtgagacttgtctccaaaaaaaaaaaaaaaagccgggtgtgctgaatacccatctcagcttctcaggaggctggggcaagaggatcacttgggcccaggagttcaaggttgcagtaagctatgatggtgccactacactccagcctgggtgacagggggacccgatctcaaaaaaaagacaaacacaaaaacaccaagaaggtggggctgagggcagagcatggggaggagcgtgcatggtcccagggcctgctcctgccctgacttggtgtctgggccggcaggttcgggaagaataccggaagtgggcctgcctagttgctggggggagcaagtactcagaattcacctccaccacgtctggcactggccacaatcagacccgggtaaggggctgcgcctggggcgggtgtgggcaggaaggcaccagggctagcggggctcaggcctctgggctctcctctccaggccctcagggcatcagagtccggcatatgaaggcgcatggttctggacggcccagcagctcctgtggccacagcagctttgtacacgaagaccatccatcctcccttcgtccaccactctactccctccaccctccctccctgatcccgtgtgccaccaggagggagtggcagctatagtctggcaccaaagtccaggacacccagtggggtggagtcggagccactggtcctgctgctggctgcctctctgctccaccttgtgacccagggtggggacaggggctggcccagggctgcaatgcagcatgttgccctggcacctgtggccagtactcgggacagactaagggcgcttgtcccatcctggacttttcctctcatgtctttgctgcagaactgaagagactaggcgctggggctcagcttccctcttaagctaagactgatgtcagaggccccatggcgaggccccttggggccactgcctgaggctcacggtacagaggcctgccctgcctggccgggcaggaggttctcactgttgtgaaggttgtagacgttgtgtaatgtgtttttatctgttaaaatttttcagtgttgacacttaaaattaaacacatgcatacagaagatggccttgcctgctggtggtgattcagaggccgggcccagggtgtccgtgaaaggccaagatgaccaagaaatagatggggtgggagccaggcttccataataacaagtttattctcatacaatctctagcttctcaacagtggcgcctggaaaggggaggtgaagctgcatgcgggcggctccgggtgggcggctctggcacgtggtggttaccggctctgctcgactgtaagacatgagatgcagtgaactgaagggccgggggaggaaccctctgccccagacccctggccctgcccaaggcacttactgtatgtggagatgtcgatttcctctggaagttctgccacattaacttcaaaccggtcctggacgtcattgaggattttggcatcattctcgtcagacacaaaagtgatggctaggcctttggtgccaaagcgacccgcccgggccacctgcaggcagacaggatcagggtcaggccacagatactacctcaggacttgaggaaaagcagggctggggccccaccccaccgccaggggaaagcaacatgcccgtgaggctgctcacccggtgcaggtaggtgtccgagtcctcaggcatgtcgtagttaaagacgatgttgactcgctcgatgtccatcccccggccaaacagattggtggccaccaggatccgccgctggaaatccttgaactgctgatagcgtgacaggctggggtgcaggagaaacaagtggaggccgtcagacactgggctcctggtggtgctccctgcagccttggcgggcggctcgcactcaccgctcctcctgggccatgccccggtggatggcgatggccgggaagttctgctccacgaggagctgggccagggccatgcagcgctgcactgacttgacgaagattatcacctgagggaaggagtggcagtcagggccacacagtccctgtggcccagtgacctcccgaaggtcctgagccccaggacaggctgatggaagtatcacctggttaaactccagcacatccaagagatcaaagagcttgcggttcttctcactgtctttgagtttgacgtagtactgctgcaggccgtgcagcgtgagcttggtctcgtcgtccacaaacacctccatgggctgtgtgggaagggaggtgggaggggcgggcagggatcacctctgggcatctcgcctgcccagaaccttccagtgggcgactcctttgtgcgacacttcccagaggacctgctgcaccagacctcagtaaacatcgctcaaaagctggatgtaagctctggcccgactcaggtgtggaccaagcttgactcccagtttgacaagaccgaggggaggaaaggaggctccgccggctcccagcatcccagcatcctccgtgccatgtgggccgtgcgggtgtcctggggccccaggctccaggcccctggggaaggccaaagctgccactctcgccctactcacatcctgcatgaacttcctgcacacaggccggatgtccttgctcagggtggcgctgaacatcatgcactgcttctcgtgtggtgtcaggcggaagatctcctgcacatcccgccgcatgtctaggtggggagggcaagacatgggtgggcatgagcgtctgccatgcaggacccccaccccagaccagacccagacccctcccaacctgtgccagggagccagtggcaccgtgacgagggcagagtgagccgcgggagtggccagtcctggtgcctgaggggctggggggtggccagcgagcgcaggcgcgggaggagctgcaatccacttacacgctggcgcggagcagccgtgcccgtgcgcctcgagccacgcttcagggaggggagcctgaggcagagacagccgctggggtgagagctgcagctgcctcccaggacacaagcccatctcccaccggccctgtcggggctcactgagggcaggcggggcctggaaccaacccaacaggtggcagaagcctcatactcccagaggtatgtgtgcatgcctttacgtccaggagggacgggggcttgcttgggccccgtggtcccattcggctcgggctcagaaacagcacatccctctgccagcagcagagctttccccaagatcaccacaggagccccgcctgccggccgcccatgtaacccactcaagagccttccgcctgctatggggcccgcctagtcactgactctcagctggggctgcaagggcagaggactcacccagctgctccagcatcttgtcacactcgtccagcacaaagtgcttcacattctttaggctgaagctcctattccgcacgagcgccaggatgcggcccggggtccccaccacgacatggggacagttcttcttcaacacttcttcatccttcttgatggagagaccaccgaagaacacagacacctatggggatgaggaggaaaccgctccatgctgatacacggcccaaggccccaacctgcacggcccagcacctgcgaacaggaggcctcaggggaccaaggcaggcctgagagcctcccggggctccactcaaaggcagccccaggctgggacctgcgcaggcccctgggagccatgcataattcatcaggcttttaaggagcaaaaaccaccgcaaacctcaaaggcagctgcccctgccaagcttggtaaatgctggctgggccagagccgaggctaacaaagctgcagaaaccaagtggcgcctggtccagtctggcccgagggactcaccttgacgctgggcatgtacttggaaaagcgctcatattccttgctgatctggaaggccagctccctcgtgtggcacatgaccaggaccgtcacctgggaagtggcataagaagagggccttaccttaggcagtgtcctaaaccccttccccaccagagtccacccaacccagtccccctgacactgcacccaacatcacaggccatttgaaggcccggtccaaatgcctcccacttctcacggcccttccccacccctcactccctataccctcccacagctattgaaacctgtctcccaacaccaggacccacaataagaaacagaaaatggaacagaaaatggcccgcataatgtaatggttagacctggcctgcctgggtgacatgggacctggctctctaaggatttcctgaatctcggcactcgggcggccccggtcttcccacccgtgccatcagacactggaccacaccacagccctccacagcaccttcatccttcaggatgtgctctgagataacgagggcacgggcgccaatatgaagcccaaagatgtgcacctggcctgactcgggagcaagacaccagaattcactgaagtgtctccccaggacagtggcacacaagacaatgggagaagacagccagggcctaacagcaaggacagtggtgacagctatattcggggcaacccaaccttcacagatggacactctctaggtaagtggcacggcaaaacagcaacgatgcctctggggcaaggggcaaactgtgggcactttccagttattttggcttattggcaatttctaatttttgttataactaattattttttgagatggagtctacctctgccacccaggctggagtgcagtggtgtgatcatagcacactgcagcctcgacttcctgggctcaagcaatcctccagcctcagcttcccaaagcactgggctaacaggtgtgagccaccccatccagcctactctacttccgccgccacaggcagggtggggccaggaagggaggagcccacccacctgtccgttgacaggctcaatctgctgtagggtggccagcacgaagaccgctgtcttgcccatcccggacttggcctggcacaggacgtccatgcccaggatggcctggggaatgcactcatgctggactgcaggagaagcagagcgtgagggacgagaacctggatgcacccccgtgcaggatcctcaccagttgaccgggggcccacagtgagggcaatcagaagaggccgagtccggacaaggccacagacacctgcagggctggggtatccgcctggtcaaagcagaacgccccactgccgagggcagccacaggccccgctgggcacaactgatccgcgggacagacgggcccctccctcacccacggcaaactggaggcggcaccgctctgggcgggcagggctggtcttgtcttggtgaggacctgggcaagaggataacacccagaaggcgtaccctcagaaggatgctcaaagccacagtccacgatggcccgcaggagctccggcttcagcagaaagtcccggaagccagagctgtggatggaaacgtaggatcccttgatgtctttcttagggggagctggtgtgctctcttgaggagcctggggctcttcctcttcatcgtaatccaaaagatcgttttccacatcctgttctgccatgatgctgagaagagagagaggcagggtcccgcgagtgggcacagaaggatgatgaagcttcattcaaatggcattctctgccgcctccttccatgagtgagcccatcagctctacctgggctgcacctcgcagcttcgccctgtctccacctccccacccccaagctaccccatctctcccccatgcccctctggccacacccacagacagaacaccctccacctccaagggcttcccatggctcacagagttaaaatcccaactctcaccacaggccaggcaatccccttggtttgacccctgctcacctcatcccacaccacccccagccttgttcagctgctcagacccctggagcccctgccccaagcctttgaacctggctgtcaccgccaggaatgctctgcccccaggtctctgcacaaatgcctccttctccacacgcaagcctcagctccagtgaacctcctcagactactcagcccagagaagccccctccctatcactccccaaggaacccactgggctttcatggggcaggagcccaaagatcccaggggtggggctgccaggatgctggtgggaactgagtttgcgagagagcaagcagtatctgtccagccccagcttctcccactctctgtggtctgcacaggggaataattaagtgctctcatgaaaggcctcctattgggcctgggccaataaaaataaagctgagaagatggaaaatggaattaatacaaagtctgcctacctctttgctttattaatctaatgcataccaagtgcctgctgggtgcaagggacccaaacatgaggacaattgtctttcgtcctcctcccctaccccagactccagtggggggtggagcagagggtgacagctgctacaattcttcctgaggctggatgctgaggatcctaggccacttttggcctcgctgtcactcattcccggctcagaaacagcaattccattgtctcaatggctgttttctctctctcaacctccctgtccatgaggcagtgaatcccaccaaggccctctggccagttctcacctatgctaccatgctggccccaagctgctatcacctgttttattattattattattattattattattattattattattattattgagatgaagtcttgctgtcacccaggctgcagtgcagtggcgcaacctcggctcactgcaacctccacctccagggttcaagattctcctgcctcagcctcctgagtatctgggattacaggtgcttgccaccatgcccagctaatttttgtagttttcgtagagacagggtttcaccatgttggtcaggctggtctcaaactcctgacctcatgatctacccacctcagcctcctaaagtgctgggattacaggtgtgagccaccgcgcctggccttattattatttttaactagaacagctttacaggctgcgcgcggtggctcacgcctgtaatcccagcacttttgagagaccaaggcgggtgggtcacctgaagtcaggagttcgagaccagcctgaccaacatggtgaaaccccaactctactaaaaatacaaaaatttagccaggcatggtggcaggcgcctataatcccagctactcgggaagctgaggcagaaaaattgcttaaacctgggaggcggaggttgtgatgggctgaaatcacgcttcactccagcctaaaaaaaaaaaaaaaaaaaaagaaaagcttcacagagatatttacatgctatacaactcaccacttaaggcagataattcagtggtttttagtgtagtcacagacatgtgcaaccactaccacatgtgcaattttagaatacttcatcaccttgaaataaaagctcctgtaccctttacgtatccataccctaaacaccccaccccagccccgggcaaccactaatctgctttctgtttctatggatttgcctgttgttgtggacatttcacataaatgaaatcttataatttgtgacattttgtgtctggcttctttcactcagcacagtgtgctctaccacatcatcagtactcccttccttttttttcccccctctttgagacaaggtcttgctctgttgcccaggctggagtgcagtggcccaatcaaagctcacttcaacctctgcctcccgggctcaatcaagcgatcttcccacctcagcctccctagtagcaggagctacatgcgcccgccaccactaatttttgtatttgtaacagagatggggtttcaccatgttgcccaagctgatctccaacttgtgggctcaggcgatccgcccacctcagccttccaaagtgctgggattacaggtgtgagccaccacacctggcctcatttctttccatggtcacctaatgttccatctcaccaacatactacattttgcttaaccactgtcagctggacatgtaggtgccatcatctcttgcctgaattaagccaatatcctcctccctggtttccctgttgccatcccccagcccctccccagagcagccagaaagaccctatcaaactaagtcacggccaggcgcggtggctcacacctgtaatcccagcactttgggaggcctaggcgggcggaccacctgaggtcaggagtccaggaccagcctgaccaacatggtgaaaccccatctctactaaaaataccaaaaatgtgccgggtgtggtggcgggtacctgtaatcccagctacttggaggcaggagaatcacttgaacctaggaggcagaggttgcagagagccgagatcacaccatggccctccagcctgggcgacagagcaagaccaagactctgtctcaaaaaaaaaaacaaacctaagagtacatcactattctgctcaaaacttttaatgggttcctactgtgcttagaaaaaaactcgagtcctcacaaagccagcctaccgggcccctcctaacccgactcctctatactcatacctcatctcccccattgcccctcactcgccagccttgctgccgtgtctcaaacacacctcagcacctttgcacttgctgttcctgctgcctggaagggtcacaaatcccccacttcttttgggcctcctttgctccagaaaggcatttcctcacagccccaactaaaacagcaccgcttccagtcagccctgccctgtgagaacagctaataagcactccatagcaatggctgaataaatggaactagaataaaggcgttcaggcagagttgaacatgtctctttatctgacccttcaaacaggcaatctgaaggggtcacttcccaggcagcagggaaaacaggagccaagaaaggtcagtccgaaaagcaccagagccttttggggtatgcagagtaggactagctggctggcgtcagggcagaagacaaagctggaagagctggtcagccacacagggcatgtgtttgtttgtttgtttttttgttttttgagacagggtctcgctctgtcacccaggctggagtgcagtggtgcaatcatagctcactggagcctcgacctcccaggcccagtgagtccaccacctcagcttcctgtgtagctgggactacaggtgcatgccaccacgcctggctaatttttgttttagtagagacagtgtttcaccacgtttcccaggctggtcgtgaactcctggactcaagcaaacctcctgcctctgcctcccaaagtgctgggattacaggaatgagccacccaccacgcccagcctgggcctgtgtacttgttaagcaatagggaactgctaattagattggagctgagccactcaatcaggatctgcccaagagtactgtaacttactcctccgatgaaggggtaggttaagaccagtagcagggaaaaccagtcaccaaataaaagagaagtaaccagggtaggggcgtgaggtaaggaaagaaagggtgggacatgccaaaagacaggaacatcccctgaccaatccatgggtagagaaaagccacagtctattctgggctccaaatctaggtggccaagagatggtgtattttaaggaaataaagcaaagttgttttgttggtggggaaataaatttggggcaggcccggcatggtgcctcacttctgtaatcccagcactttgagaagccagcgtgggaggatggcttgagcccaggagttcgagaccaacctggacaataagtcgagaccgcgtctatacaaaaacaatttttaaaaaagtagccgggtgggtggggggaggggggagggacagcattaggagatatacctaatgcaaatgacgagttaacgggtccagcacaccaacatggcacatgtatacatatgtaacaaacctgcacgttgtgcacatgtaccctaaaacttaaaaaaacttaaaaaacacatagcccaaggggcaccttctatgtagcaaaggctaaaaaataaataagtagaaattaaaaaaagaaaaaaattagcccggtgtggtggcatgggcctgtagtcccagctacttgggaggctgtgccgggaggatcgcttgagccaggaggtcgaggctgccagtgatggcgccatggcattccagcctgggtgacagagggagaccctttctcaagaaaaataaatttaaaaaaagaaattggggcccagcgtggtggctcatgcctgtaatcccagcactttgggaggcgaagcgggcggatcacttgaagtcgggaattagagacaagcctgggcaacatggtgaaaccccgtctctactacaaatacaaaaattagccggatgtgcttgcttgaacccggaagacggaggctgcagtgagccgagatagtgtcactgcactccagcctgggcgacagagcaaggctctgtctcaaaaaaaaaaaaaaaaaaaaaaaaagagagagagagataaataaattggggtgaaccgaatctgctaagataaaattttcgagaaaccgggctggacaggatctaaagctcaaaactgattagatcaggaaaggatccggcggggttttccccgcccaaagtgggtggccatgaccgctaaggcgccaggagcgcatgaacttgaaaggtgacagcggggaactcacaacccagacacgccacgtgtacccagttaccctcaagtgtccccaggcaggctttccaccccggagtttattcccacctggggactcctatttccaaaagaaaatctttttttcattctgttttttttgaggcagaatctcgctctgtcacccaggctggagtgcagtgtcgcgatctcggctcactgtaacctccacctcccgggttcaagcgattctcgtgcctcagcctcccgagtagctgggaccacaggcgctcgccaccacgctcggctgatttttttttgtattttgagtagagacgaggtttcaccatgttggccaggctggtctcgaactcctgacctcaagtgatccgccctccttggtctctcccaaagtactgagattacaagagccaccgcgcccggccttccaaaataaagtcttatttgctctaaatctcagaatcccgaatcccgtaaaaagtagaccaagaagaaggtagactgggaaagggatcaagtccctcggacccaaagaaacccctgacaactgaaagctccaacttctcccacccaggccccagaccccggcgtcaccccctcgtccctctccaaatggccccaggccgccgcggggtctattcggacgaactgacagactccaagtggggctcggagcgccgtaggccatgacagcccctccgagaagcgggccccgagccccgagcaccgcgcgccaacggctggcccacccctagcgcatgcgccccggtgcccaacggccaacacacagcgctctgacacaccaaccgccccgcccccaccgtctcgcgaccctttctccccctccccttagatcccaacgtctcccctcgtcctctcgctctcagttcagacgtccccacaccgcggccccgcgcccgggatccgctgctcacctggctccccgttcttctccgcgcgctgctaagagacacttccaacttcggttttccgccgggcgctcagacacgagttgctgcgcttcctgcctcttgcgtcgggctgctgctctgctgactgggccgctgccttttcattcaagagaggccgaagcggtgattgggtcctgtggaagggaccgggagattattggcggagacgggaagaaagagggcgtgccttacgcctcgcgtttattggtcaatctaaaagtaggcgcgccccagtgagccgacagactggctccgacagcgcgcggtctcgtgatctgggtgtggtgctcggtgggagccgccatgtttagtactgataactgaagaccggatgattgcgttttggcgtgtgccccaccttttcgaagagtggcgtctgcgctgggcgctgaaaccagaactgtcccagttgctatcaatctgcggcctgggggtcctccacagtgtaggctctgaaaagaatagggagcttggaatgactcaaatggacagaacattttgcagtatttggatttctatcgctccacgatagttttgtctccttgattttcacgttagtagaagcatgcaataggttgtcttttgtgtctgacttttgctcaacaaagctgtttttttgagacggagtctggctctgtcacctaggctggagtgcagtggcgcgatctctgctcaccacaacctccgcctctcgggttcaagcgattctcctgcctcagcctcctgagtagctgggactgctggcgcccgccaccacacctggctaattttcatatttttagtagagaggggtttcgccatgttggccaggctggtctcgaactcctggcctcatgtgatctgcccatctccgcctcccaaagtgctgggattacatgagccaccctgcctggccgcagcaaagtgtttttgagagttgtccatgttgtggggatatcaacagctcgttattttttactgctgagtggtatttcattgtgtggctatactataatgtagccaatatagtttcactcacctgttcttggccaattgattgtttccggtctttggccactgttaatagagcttgtactgtaagagtattttggggaagataaattttcatttcttttaaatacttaggagtggcatggtggcatggtcactaagctttattagatcctggcagatttattttcctatcatccttcctccctctttccctccactttcttctttctttcttcagggtgtcactcttgttacctatcatgcccagctaatttttaaaaatttggtaaaggtggggttttgcaggccgagcgtggtggctgacacctgtaatcccagcactttgggaggccgaggtgggtggattacctgaggtcaggagtttgagaccatcctggccaacatggtgaaactccgtctctactaaaaatagaaaaattagccgggcgtgttggcgggcgcctgtaatcccagctactcgggaagctgaggcaggagaatggcgtgaacccgggaggcggagcttgcagtgagccgagatcgcgccactgcactccagcctcggcaacagagcgagactccgtctcaaaaaaaaaaaaagaaaagaaaagaaaaagaaaatgccaagtaaagaaaggatcagcgggcaccagggctcctgcctataatcccagcactttgggagaccaaggagggcggttcacttgaggtcaggagtttgagaccagcctgacaacatggagaaaccccgtctgtactaaaaatgcaaaattagccgggcgtggtggcgcatgcctgtaatcccagctactcgggagggtgaggcaggagaatcgcttgaacctgggaggtggaggttgcagtgagccgagttcgcaccattgcactccagactgggcaacaagagtgatcacctaaggccaggagttcaagaccagcctaggcaacatagtgagacctcatctctacaaaaaataaaataaaataaaataaaaattagccaagcatggtggttgatacctgtactcccagctactcgggaggctgaggcaggaggactgttcgagcccaggagtttgaggcttcagtgagctatgattgcaccactgcactccagcctgggtgaaagagtgagacccagtctctaaaataaatgaataacacattgtaattaaagtcaaagtcacggccgggtgtggtggctcacacctgtaatgccagcactttgggaggctgaggcgggcagatcacctgaggttgggagttcgagaccagcctgaccaacatggagaaccctcgtctctactaaaaacacaaaattagccagccgtggtggcatatgcctgtaatcccagctattcgggaggctgaggcaggagaatcgcttgaacctgggaggcggaggttgcgttgagccaagatcgcactattgtactccagcctgggcaacaagagcgaaactctgtctcaaaaaaaaaaaaaaaaaaaagttgaagtcacctgtgcttcactccaactcctttcctcccagtacagaaacaatgccctaaagaaaaacagtcgtactgaacagttactgcacccacctttacaagaattacagtcatggggtcacataatgacacggacatgttgaggaatgtctccataggcaatcttgtcattgtatgaacatcatggagtttgatacagtttggatgtttgtcccctccaaatctcatgttgaaatgtgatccttcttgagcccaggaggttggggctgcagtgagccatgtttgtgccactgcactccagcctgggagacagagtgagactgtctcaaaaaaaaaaaaaaaaaaaaaaaagaggaaagaggccaggtgcggtggctcacgtctgtaatcccagcactttgggagctgaggtgggcagatcacgaggtcaggagatcgagaccatcctggctaacacggtgaaaccccgtctctactaaaaatacaaaaaattagctgggcgtggtggcggacacctgtagtctcagctacttgagaggctgaggcaggagaatggcgtgaacctgggaggtggagctggcagtgagctgagatagcgccactgcagtctggcctgggtgaaagagtgagactccgtctcaaaaaaaaaagagaaaaaagaaaaagaataaaacaaaaataaagaagaaagaggaaggaaggaaggaaggggaaacgaaggaaggaagccaggcaggcagacaggtgatccgcagtgttggatgtgggacctagtgggaggtctttttggtcacaagggtagatccctcatgaatggcttagtgacatttccatggtaaagtgagttctccttctattcatgagattgctgatcgtttaaaagagcacggcactgctatcctctctcggtctggcttccttcctgtctcaccatggaatgcctgctccccttccccttcaactatgattggaaactttccgaggccctcccagaaacaaatgctagtgtcatgcttctggtacagtctgcagaactgtgagccaaataaacctctttataaattacccagactcaggtattcctctatagcaatgcaaactgacctagacaagggaacttagataaacctagatgggtctgggcatggtggttcattcccagcactttgggaggccaaggcgggtggatcacgaggtcaggagttcgagagcagcctggccaacatggtgaaacactgtctgtactaaaaatacaaaaattagccgggcatggtggtgcgcacctgtaataccagctactcaggaggctgaggcaggagaatcacttgaacccaggaggcggaggttgcaatgagccgagatcctgccattgcactccagcctgggcaacagagtgagactccatctcaaaaaaaaaacctagatggtatggctactacacgtgtaggctatgtggtatagcccagcagtccccaacctttttggcaccagggacctgaatgatggaagacaatttttccatggacgtaaggagggtggatggttctgggatgaaattgttccacctcagatcatcaggcattagttagattctcataaggaatgggcaacctcgatccctcacatgcacagttcacaatagggttgagctgctatgagaatctaatgctgttgctgatctgagaggaggcagagctcaggctgtaggtaatgctcacccatcactcacctcctgctgtgtggcctggtccctgacaggccacaaggccagggaggggtgggggtggggacccctgctatataaagcctactgctcctaggctaccaacccggacagtgtgtaactgtctgaatactgtaggcaattgcaacacaatgctaagtatttgttttgttgtttttaccttcatcttctttgtgatgttacaatggtaggtatttggatatctatacatatcaaaacatagaaaaggtactgggtgtagtggctcacacatgtaatcccagaactttggaaggctgaggcaggaagttcaagactagcttgggcaatgtggtgagacctcttctctaccaaaggaaaaaaaaaaagctaaaaagctacttcatataaatttcctttcatttccctttttatttttcccatttactttttttttttttttttttttttttgagacggagtttcactcttgttccccaggctggagtgcagtggcacgatctcggctaactgcaaccaccacctctcgggtttaagcgattcttctgcctcagccttccgagtagctgggattacaggcacctgccaccatgcccgactaatttttattttttttcaaacagggtctgggccaggcacagtggctcacgcctgtaatcccagcactttgggaaccgaggcgggtgaatcacctgaggtcaagagttcaagaccagcctggctaaaatggagaaaactcgtctctactaaaactacaaaaattatctgggcatggtggcaggcacctgtaatcccagctactcagttgtctgaggcagaataatcttgtgaacctgggaggtggaggctgcagtgagctgagatcacaccactgcactccagcctgggcgacagagcgagactccgtttcaaaaaataaaattacatgatataaataaaaagaaaaaaataaacagtctggctttcactcgggccatagtgccaggtgagatctcagctcactgtaacctccacctccttggcccactaatttttgtatttcttagaagaaatgaggttttgccatgttgtccaggctgctctggaactcctgagctcaagcaatcttcccgcctctgcctccccaaagtgctaggattataggcatgagccaccccgcccagcctcctttactttatacattttttcactttatatatatatgtgtgtgtgtgtgtgtgtgtgtgtttgatacaaatggtatcagactgcatcattttgttcctttctttctctttagtatcattaaaaaataactagaagctgggcccagtggctcctgcctgtaatcccagcactttgggaagctgaggtgggtggatcacttgaggtcaggagctcaagaccagcctggccaacatggtgaaaccccatctctactaaaaacacaaaaaattagccaggcgcggtggcacacgcctgtaatcccagctactcaggaggctgagacaggagaattgcttaaacctgggaggcagaggttgcagtgagccgagatcgtgccattacacttcaaactgggtgacagagcaagattttgtctcaataataataataataataactaaagatgatgctctccctatgctgcccaggctggtctagaactcctgtcctctgcaatcctcccacctctgcctcccaaagtactgggactacaggcctgaggcactacgcttagtccttttttttttttttttgagagagtcttgctctgtcgcccagactggagtgcagtggcatgatttcggctcactgcaacctctgcctcccaggttcaagcgattctcctgcctcagcctcccgagtagctgggactacaggcgcccaccaccacgcctgactaatttttatatttttggtagagacagggtttcaccatattggccaggctgctctccaactcctgacattgtgatcctcccgtctcggccttccaaagtgcttggattacaggcataagccaccgcgcctggcctttttttgtatttttagtagagacggggtttcactgtgttagccaggacggtctcaatctcctggcctcgtgatccacccacctcggccttccaaagtgctgggattacaggcgtgagccaccgtgcccagcctaccttgcagttttctagcttgtctttcccaagtttactccagtacctgcccttcagggaagcctacactgactgcttcctctgaagtgcgacagctaccccctccagcctttgcagtctgggatacctttcgcctgatacctcatactgtgcccactcattcctttcacaaagacggacgtagcacaggctctgtgcaatttcagggaggagtaacatgcaaaataatcaaacagggccaagggccagaaatgacgtcggtgtggtctaggaagattgctcagaagatgttacatttaaacagataactaaatgagcaaaaggggccagccctggaaagatgtgatagaaaagcattccagaacagataacagccagtgcaagggccatgtggttggaagtaaggtgagactatttgtttttgtttgttttttttttgacggtgggaggtggtttgtttttttgtttctttggtctcactctgttgcccaggctggaatgcagtagcatgatttttgttttttatttgaaacggagtcttgctctatcacccaggccagagtgcatggcactgtctcggctcactgcaacctctgcctcctgggttcaaacagttctctgcctcagccacccaagtagctgggattacaggtgcccaccacaacacccagataatttttgtatttttagtagagatggggtttcaccatcttggccaggctggtcttgaactcctgacctcgtgatccacctgccttggcctctcaaagtactgggattacaggcgtcagccaccgcgcctggccttttttttttttttttttttttttttgaggtggagtctcactctattgcccaggctggagtgcaatggcatgatcttggctcactgcaatctctgcctcccaggtttgagttattctcctgcctcagcctcccaagtagctgggattacaggcaagcaccaccacgcccaactaatgtttgtattttccatagagatggagtctcactatgtgggtcaggctggtctcgaactcctgacctcatgacccgcccacctcagcctcccaaagtgttgggattacaggcatgagccaatcgctggcctttttttttttttttttttttttctgagagagtcttgttctattacccaggctggagtgctatggcatgatctcagctcactacaacctccgcctccctggttcaagcgagtctcctgcctcagcctgctgagtagctgggattccaggtgccggccaccacgcccagctaattttttttatttttttagatggagtttcactcttgttgcccaggctggagtgcactggtgcaatctcgactcactgcaacctccgtctcccaggttcaagcaattcttctgccttggcctcccaagtagctgggattacaggcacccaccaccacatccagctaattttttgtatttaataaagacaggtttcaccatgttggtcaggctggtcttcaactcctcacctcaggtgatccacctgcctctgcctcccagagtgctgggattacaggcacgcacagcccagtggcacaatcttggctcactgcaacctccacctcctgggttcaagcgattctcaagcctccacctcccaagtagctgggattataggcatctgccaccacagctggctaatttttttttgtattttcagtagagatggggtttcaccatgttggacaagctggtctcgaactcctgacctaaggtgatcaacctgacacagcctcacaaagtcctgggattccaggcatgatccactgtgcctggccaaggtgagactatttgaagaacatagtgaaggctaatgttgctggatgggggtgaggagagtgaggtgtttggacaggtgggcagagaagtctgacaagaccaccttgtagaccaagtgaggagtatgaagtttttcctaagtctgctgggaaaccaggcacaggcacgttttctagcagggagaagcagggatggtgatggtgtgatttaggatttccaaggccccagagtgaattagagaggggtgagaacagctgcaaggatgtgccggtgcagttatcatattttgttgagattgtacaattagtcctttgtctctccccctgacactttttttttttttttttttttttttgtcttgctctgtctcccaggctggagtgcagtagcatgatcttggctcactgcaacctctgcctcctgggttcaagcgatctcctacctcagcttccctagtagttgggattacaggcgtgtaccaccacacccggctaatttttgtatttttcgtagaggcggagttttgccatgttggccaggatggtctcaaactcctgacctcaggtgatccacctgtctcggcttcccaaagtgctgggattacaggcatgagccactgtgtccagcaaccaccaccccgctccttttttatttttattgtttttgagacggagtcttgctttgttgcccagtctggagtacggtggtgcgatctcggctcattgcaacctctgcctcccaggttcaagcaattctggtgcctcagcctcctgagtagctgggactacaggcatgcgccaccatgcctggctatgtctccccgccccctttcttggtttgtttgtttgttttttgagacggagtcttgctcttgttgcccaggctggagtgcaatggtgcaatcttggcttgctgcaacctccacctcccggattcaagcgattctcctgccttagcctcctgagtagctgggactacaggcactcaccaccacacccagctaattttttttgtatttttagtacagatggggtttcaccatgttggccaggctggtctcaaactcctgatctcaggtgatccacccacctcggcctcccaaagtgctgggattacaggcttgagccaccacacctggccacgtctccccttttagcaaacaaagtgtggctggacgtggtggctcataactgtaatcccagcagtttgggaggccgaggcgggaggatcacttgaggccaggagttcaagaccatcctgggcaacacagtgagacttcatctctgcaaaaaaaaaaaaaaaaaaaaaaaaaaaagaattagctgggcatggtagtgcatgcctgcagtcccagctactcaaggggctgaggtgggaggatgacttgaacctgggaggttgaggctgcgctgcagtgagctgtgatctcacccactgcactctagcctgggtgacagaatgagactttgtctccaaaaaaaaaaaaaaggcctgaactgcaactttatctccagtgccaccaaattccccagtgggtctctgtaaatattcactgagtaaatgaatgcctgaagggtggagcgagaatttggctggtttccccagctccatctggggaggcagcctgggacctcacaggttggggagggagggcccatccctgtgcaaggtggttccagacaacccaatccttcggcccccatgaaacctcactctgccttgtcctcctcatctgtagaatgggtgggctggagaattagagggagctacttcgtttctcagggaaagggccatagacatcctggcttgatgattggggtaagggacttctcagcttactcacctgcaaaactggagcaaaagaactagtttgggccaagcttgatggctcatgcctgtaatcccagcatttcaggaggccaatgcagaagaattgcttgagcccaggagttcaagaccagattgggcaatattacgagatccagtatctacacacacacaaaaaaattttttgaaaaaactagccagacatggtggtgcacacctgtggtcccagctacctgggaggctgaggcaggaggatcgtttaaacctgcaaggtggaagctgcagtgagctgcgatggcgccactgcaccccagcctgagtgacagagtgagaccctgtctctaaataaataaatatcaggctgggcgcggtggctcacacctgtaatcccagcactctgggaggccaaggtgggcagatcacctgaggtcaggagttcgagaccagcctgcccaatgtagagaaaccccatgtctgctaaaaatacaaaattagccgggtgtggtggtacatgcctgtaattccagctactcaggaggctaaggctgggaattgcttgaatcagggaggcagaggttgcgttcagttgagatcgtgccatcacacttcagcctgggcaacgagagcgaaattctgtctaaacaaacaaacaaacaaataaataaataaatatgaaagaactagcttgcagagtttttttttgttttttttttttttttttttttgagagggagtctcgctctgtcccccaggctggagtctcgctctgtcccccaggctggagtgcagtggcgtgatctcagctcactgcaacctctgcctcccaggtttacgccattctcctgcctcagcctcccgagtagctgggactacaggcgcccgccaccacgcccggctaattttttgtatttttagtagagatggggtttcatcgtgttagacaggatggtctcgatctcctgacctcgtgatctgctcgtctgggcctcccaaagtgctggggtgacaggcgtgagccaccatgcctggccatgagttcttttcttttctcttttctttttctcccttcccctccctcccttccttcctctctctctctctctctctctctctctctctttctttctttctgacagtcttgctctatcacccaggggggtgtgcaggggtgcgatcttggctcactgcaacctccgcctcccaggttcaaaccattctcctgcctcagtctctcaagtagctgaatatacagatgcccgccagcacacctggctaattttttaatttttagtagagatggggtttcaccatgttggccaggctggtctcgaattcctggcctcaagtgattcaccccccttgacctcctaaattgctgggattacaggtgggagccactgcgcccagccacagagttctttcttttattcaatcaacaagcatttgagaaacagttagaaggctcatgtggctggaaggagtgagcaagggggagagatgggaggaagtaagaactgatggtgcagagcttcgtgggctgtggggaggacctgagttttttccctgagtgagctgggagccatggagggttctagacagaggaggggcataccccatctcatgtgttcactgctcccttgggctgttgtgggaacagactgtgggggcgagggcaaaaccaggagaccaggagagaggtgactactggttaaggtgagtgatggtagggactggatgcgacaaagtggaaaggtgaaatgtgggtgaattctgggcttgtgtgtgtgttgttgttgttttctttctctttttttttttttttttgagagggagtctcgctctgtcgcccaggctggagtgcagtggcgcgatctcggcacactgcaagctccgcctcctgggttcatgccattctcctgcctcagcctccctagtagctgggactacaggcgcccgccgctttcaccatgttagccaggatggtctcaatctcctgacctcgtgatccgcctgcctctgcttcccaaagtgctgggattacaggcgtgagccaccacacctggccccctcttttttctttttttagatggaatcttgctctgtcgctcaggctggagtgcaatggcacgatctcggctcactgcaatctccgcctcttgggttcaagctattctcctgcctcagccacccgagtagctgggattacaggcatgcgccaccacgttcagctaattttatattttttagcagagatgggtttcaccatattggctaggctggtctcgaactcctgacctccagtgatccatccaccacccaccttggcttcctaaagggctgggattacaggggtgagccactgcacccagccgtttttttttttctttctttttttagacagggtctcgctctgtcacccaggctggagtgcaggggcatcatgatttctccccacagtgatgcattctcggcctcttgagctcaagcgatcctcccgcctcagcctcctggtagctgggactacaggcgtgcgccaccatgcccggctggatgggttctggatcagcataattctcctccttctctctttctgttgttagtatctcccaaagagttgctcagaggaaaaaataagagagaaaacatcgcgccctggtttctgggacgactgaaaccacgcagagccacgggtaaccaaggtacccgcagcccacggcgcttcctcgggtcccaaagggcgccaatgtgcaggcaccgccgccagggagcgctccctgccggagccccggagaccaaggtttggctccctcgcctggtttccgaaggagtgagggtccgacggcggccacgaacaaagctgcacgctctgcagaccccggagatcccctagaaattccgcagaggcctccactctccgcttgggcacgagtctgcatttatggagcgccatctgcatgcagcagccccgaaaaagaaggcgatgcccattttatagcggggaaaactgagactcagaggccacaggggtccccaggatgaacagcaagttgggattcaaacctcttttaataacaataacgataatagaggctgggcgcggtggctcaggcctgtgtaatctcagcactttaggagaccgaggcgggcggatcacctgagatcaggagttcgaggccagcctggccaatatgatgaaaccccgtctctactaaaaatacaaaaattagccgggtatggtggtgggcacctgtaatcccagctactcaggaggctgaggcagaagaatcacttgaatccgggaggcggaggttgcagtgagccgagatcgcgccactgcactccagcatgggcaacagagcgaaactccgtccaaaaatagcaaaacaacaaacaaacaattacgataacattaaaagtgacagcagctaacacttatggagcgtctagtgtgttctcagctcttggcctgcactgtcttattgaattttaccaacaccgaggaggtgagcgcatcattcccatttcacagatgaggtgcctggaagggtttgtctccctcaaggcgtaaagcgctaggatttgaatgcagatccgcccagagcttgtctccaggtaacggggaaacttccatgcccttgaataggggaccacagatgcaggcgtcccgagcttgcaaatgcaccggggtagggtggggtggggggttattctgtttgtttttttcaggggtcccgggaggcccaaaggcctccgccgctctcggcttgaacgcgtggaaccgttctcctcgggttcccgcgcgctccaatgggggacccctcggcagcgtgcggtcgtctcgggacccggaaagaggaaaggtggggagccgatggggatgctccgggctcgggagaccgagggggcggacgggcgggaccccgcagccccgggggcctctgggaacccgtcccccctcggccccgccccctccccgggcgccgacctccggggtcacgtgaccaggcccggcggccgctggggccggagggcgcggcgcggggacgcggcggcctggccaggcgaggcgggagccgagcaggccggagcgggccgcgcgccggggagggtcgcgccgcgcccgccccctccccgccacgcccggggcgcacgcgcgctcctctggccgcccctccctccgcgcggggacccctggcgggcggcaggaggacatggccagcgacgccgtgcaggtaggcgcacctgcgtctggagtcccggggcgaccggacggcgccggcggaccccgcccgcgcgctgccgggggagcccccccagcccccggaacgggactcgggtgacgatggcaagggcgggggcctccggagcgcccggcgccccctccctgggccgggactgtggagccagcgaggcccccttctcggcaggtggcgatgtggactgggctggtttgggggcgatcccggaggcaacccctgctacaccctcaaactcggcctctcctggagaactagaaggggcgcggcggaggctctacttcgggtgtctgtggctggctgggcgtcccagtgcctctcgtccgcccccaaactcatccccctccccagggttgggtacccggcaggtgccgctccacctggggcacgtgcctggcgcagtgccctgggaggggaggaggctgctgggcccggcccgtgcccttcccccgcataacaaagctccagccacccccgcctctagacagctttatgatgttccagacgccacccagattggcacctgttggcggaagtacccgagtcactgcattaggtcgggggaatggggacccccactcccacccttgggctgtcaggtggaaccttctcctgggtggggagtgtctcagtcaacaggccagggatgctcccatatatagaatcctacttttttgcatggtggctgggcatggctgggtcacccccaccctgctaacacacacacgtgactggcaccagcctcccgcccagccagattccccttgtgccacctggtggggatcactgacctggactcatcttccccgtctgtgacaagcacggccagggtgactgccaaccttctttggttcaagtgacccaaatctgagaaatgtctgtgcctcagtgtccccattagcacctcaccatccagttcattgtcctgtggttgttgtgtaactgggttctcgtctccttctgcacctgcccccggcccctttgtgtctccccggtaacccccggtccctcccgccttcccagtcctgctgatggcctgccggccttgccgaggagctgggcgtatctggtgttgccgatcacacaaggtcagacctcaaggccgggatgggccggggtccctgcctctacccccggcccagggagggctgtgtaggaatccccgggtgcatgcatgcgcttggcgcatcccacacatgacccagacaggctgtgattcctgcaacgaggctggacccacgccctggtccccccttcccatctcctccccagtctcttccccgctcctggtcatccctctctcatggttgcttgggcctgctgccctgtccctctgtctgtcccaacgtgtgcctgtctgttctgtgtcctgcaaacggatgtcctgtccagattccggaaacgcccaaggcattgaaatctccggatgtgggagtctaggtccctggctgctctggcaagatggggattatgggaggcaggtcctctgggtctgaggtctccgctccatggtgggcagcggaggagcaggggttctccataggacaggccaggccagggccctgagtcctgggtttgccttgctggccctcaggtgacccctgtgccttgggtagaagtgagtcactcaggggaggagaacccaggagcccagcctccctccctctgtgcattacagacctcagctgctggaggtggggctgagggaggccacctctcctctctgcctggacttccccagttgagctggccccgctcttggctgtgtcctccctctgcctgctggggatggggtggggccttctgagcgagggtggtatttggtgagcctgggcttaaattccagcgctgacacttcctcgctgtgtgtcctgggcccagtgccttcgcctctctgagcctcggttctgacctaggaaaaatgggactaagagggtgttcatgggagagagagagaccgagaccttgccagcacttggcaggcagggctgctgtgaagtcgttactggtaagcgtcctggtcagcagctcagggtgtgaatctgtgtccttattgattgatttactgatttatatttatttattttagaggagagagtcttgctctgtcacccaggctggagtacagtggtgcgatcctatgtcaccgcagcctcgatttccaatttccggggctcaagtgatcttcctgcctcagcctcccaagtagctgggacaaaaggcacagaccaacatgcctggctaatttccttttacttttgtagagacagggtctcgctctgttacccaggctggaatgcagtgacgagattcttgttcactgcagcctcaaacacctgatctacaggactacaggcatgcaccaccacacctggctaatttttttttctttatttttttaaattgagactggggtctcactctgtcacccaggctggagtgcagcggcatgatctctgcctcctagactcaagccgttctcccaccccagcctcctgagtagctgggactacaggtgcacaccaccacgcctggctaatttttgtatttttagtagagtcagggtttcgccatgttgcccaggctggtcttgaaatcttgagctcaaagtaacctgcccgcctaggcctcccaaagtgctgggattacaggtgtgagccactgcccccagcctttctttttttcttttccttttttttttgtgatggagtctcgctctgtcgcctaggctagagtgcagtggcttgatctcggcttactgcaaattctgcctcctgggttcacgccattctcctgcctcagcctcccaagtagctgggactacaaacgcccgccaccatgcccggctgatttttttgtgtttttagtagagacagggtttcaccttgttagccaggatggtctagatctcctgacctcgtgatctgcctgcctcggcctcccaaagtggtgggattataggcatgagccaccgcgcctggcctctttttttcttttttgagacaaagcctggctctgttggccaggctggagtgtgatggtgtgatctcggctcactggaacctctgcctcctgggctcaagccagcttcccacctcaggctcccaagtagttgagactgcaggcacatgccatcacacctggctaattcttacattttttgtagagatggggtctcaccgttattgcccaggctggtctcgaactcctgagctcaagcagtcctccggccttggcctcctaaagtgctaggatcacaggcagagagagccaccacacctggccaatacttttttattttttgtagagatttttgtaggtcttgctgtgttgcccagacttatctccaattcctgacctcaagcactgctcctgcctcagcctcccaaagcgctgggattacagacgtgaaccaccacacctggccaaatctatgacccttaaccgtaggcttctcagccttagcactactgacattcagggctgggtcattctttgcagtagaggctgtcctgtgcactgcagggcgttgagtggcatccctggcctcaccctgatagaagtcacctccttacccacagtcaggacaaccaaaaatgtctccggatgttgccgcatgtccccgggtatggggagaaaatctcccctcaatggaaaactgttactggccaggcacagtgcctcacacttgtaatcccagaactttgggaggccgaggctggctgattgcttgaagtcaggagtttgagaccagcctggccaacatgtgaaaccccgtctctactaaaaatacaaaacattagctaggcgcagtggcacgtgcctgtagtcccaactactcaggaggctgaggcaggggaattgcttgaacccggaaggtggagattgcagtgagccgagattgcaccactgcactccagcctaggcgaaagagcaagactctgtctcaaaccaacgaacaaaacatactactgtgacttccttgagcctcagtttcctcacctgtgaagtggggagttcttggcagctgctcaagatttgtagtgagggttgggaagatggtgggagtgatacacttggtctgtggcattcctccctgggggcagctgcgcttgagatcagtcacgagccaaggataacattccttgtctgtgaaatggatgctcccagctgaaggagataaccccagggggccatttcctagccagcatttggaatctgggtgctcttgttttaaatcaaggccctggccacggggcagtgactcacacctgtaatcccagcacttttggaggccgaggcaggaggattacttgaggccaagagttcgagatcagcctgggcaacatagtgagaccccatgtctatgaaaaatacaaaaattagccaggtgtggtggcgtatgcctgtagtcccagctgctcgggaggctgagctgggaggactgtttgagcccaggaggtagacactgcagggagccatgatcacaccactgcactccagcctgggcaacagagtaagaccctgtctcaaaaaaaagaaaaaaagttacatgagatattcaactttactgtaaaatagctttgtgttagacgtttttgcccaactataggcttgggtaagtgttctgagcacatttaaggtaggccagggtgagctatgatgtttggtaggtaagatatattaaatgcatttttgacttatgatatttgcaacttatgatgagcttatcaggaagtaatgccatcataagttgttcttgaatgttactgtgtgcttagcaagtggttttgtaggctgctgatttggggcattctttttttttttttttttttttgagatagagtctcactctgtcgcccaggctggagtgcagtggtgtgatctcgactcactgcaatctccacctcctgggttcaagcgattctcatgcttagcctcccaagcagctgggattacaagcacgtgccaccatgcctggctaattttcatatttttagtagagacggggtttcatcatgttggccaggctggtcttgaactcctgacctcacgtgatctgcctcgctcatcctcccaaagtgctgggattacagatgtgagccaccacgcccggcgtgattttggaaattggaaattctttttttttttgagacggagtttcgctctggcgtgcaatggcacgatcttggctcacctcgacctctgcctcctgggttcaagtgattctgcttcagcctcccaagtagctgggattataggcatgcaccaccaaacccgactaattttgtatttttttttttttttcagtagagacggggtttctccatgttggtcaggctggtctcgacctcccgacctcaggtgatccacccacctcggcctcccaaaatgctgggattataggcgtgaggcaccgtgcccggcctggttttggaaattcttatcccagtcccccagtgctgtcccctaattgtgttggcctgagggaggtgccactgggctggctgggaccccgggcctctcagctatggtcaataacagttggcgactggactgagaggaagcaggaagttgggagggcccgtctgcaggaaaggggcctcacctctgaagaagtggctgttctgaccctgaaggggaagccggggacaaggggtggctgggagagtctggagggacatatgcaggtagtcgcagggctggaggtctgtgggagcatggatgtgctgcaggggcctcggggagcgtgcatatgtgtgtgagcatgtgcacacgcatgagcatgtgggccatgccctctcgggcaggtgggagtgtgtcttgtatgggttctagagggaagctcataagcacttgtatgtgtttgcaaataagtgcatatgtggtaggcatgggaatgggtacactgtgagcccattttccaggcacacacctgcaggtgtagaagtgtgcacctgtgtgtggatctttgtttcatccacacacacaggcatgggagtgtgcacacatgtgagcctgtgttgcaggcacacacctgcagccataactgtgcaaacacaggccaggcgcggtagctcacgtccagtaatcccagcactttgggaggctgaggggggcggatcacctgaggtcaggagttcgagaccagcctggccaacatggtgaaaccctgtctctactaaaaatacaaaaattagctgggcgtggcggcacatgcctgtaatcccagctacttgggaggctgaggcaagagaattgcttgaacctgggaggcggaggttgcagtgagccaagatcacaccagtgcactccagcctgggcaacacaaagggagactctgtctcaaaaaaaaaaaaaaaaaaaaaaaaaggaaagaaaaagaaagcgtgcaaacatttgtgagcctgtgttctgtgcatatccacatatgtatttgaaagttagtgcacactcaagtcagccctcggagcctgcgtcccctcatggatacaccatgagtgtgtgaatgtacaaactgcctgcaccttggacattctctagggacagggagcaaggactgtccctgggtttcatctagaggaacaggaggtcccttagatgccctggagttggccccgcgcgaggggtgctgggagttgacaggaaagaggaagtggcagccgagaggccctggtggggctgaggttcaggaagagggcggggccctcagcccggacccaggatggcggaggccaataacccctcggagcaggagctggaggtggggtccagggtccctgtgggggcaggcagaagggggccccaagtggcacaggccagtagtccttccccgggtacttctcagtttgggaacaaggagaggagatggggcactggcctcagagttctctctctggaggatgagagtatccagtgcccttcggggctcccagattggggagagacagaaggaaggagaccgggctctgttctttagggtcccagttgttgaacataggagaagagcagatgagggtcttcaagaccccatagtttgggggtacagcagagagaagacttggcctgcccttgggataccctagttttgggggtgtagccaaggaaagatgaggcctgccctcgggatgccatagtttcagggtacaagtgagggaagatggggcctgtcctcaggaccctgtagttttaggggtacagcagagagaagacagggcctgcccttgggccctcttagtttcggggagcagcagagaaaagaaggaatcttcccttgggaccctctagtttgggggaggcagcagaagggagacagatcttattcttgagacccccttaatgtgggggacgctgtggtggtgggggtgacaaggccctgctcttgagacctcccagtttggggaggtcaggaagcagtggcaaggcctcgtcaccttccagttttgggagtcagaggaggtagagcaggccctgtcttgggagccccagtccagggcagaggctgggccaggctggctgcatgtggtctgcacctggagttctcctagctccactgaccctgttctgtcctccgcagagtgagcctcgcagctggtccctgctagagcagctgggcctggccggggcagacctggcggcccccggggtacagcagcagctggagctggagcgggagcggctgcggcgggaaatccgcaaggagctgaagctgaaggagggtgctgagaacctgcggcgggccaccactgacctgggccgcagcctgggccccgtagagctgctgctgcggggctcctcgcgccgcctcgacctgctgcaccagcagctgcaggagctgcacgcccacgtggtgcttcccgacccggcggccacccacggtgagctgggatgcctctggggatgcgggactccagggattccactgctcactggctcacccatggtctccagagccaggttaacccatctccacggacccccagggagatgcatgccatgacccccgtagccaccaacacccagagaggtgcatacagccacaccagcacccggtaacactcaagaccgtgcatgctgtcacatgaatacctctagacacagccacgccaacacccaggcaacattcaaggatgtgcatgcagtcacacaaacacctaaaaaaacagccacaccaacacccaggcaacacccaagggtgcacatactgtcacacgaatacctccagacacagccacgccaacaccccaggcaacactcaaggatgtgcacactgtcacacgaatacccagaaactcccacagttacatggatgataaccaaagactgtttatttttgtttttgtttggagacaggatcttgccttgtcacccaggctggagtacagtggtgtgatcaaagctcactatagcctcaatttcctgggctcaaacaatcctcccacctcagccttccaagtagctgggactaaaggcatacaccaccatgcctggctaatttaatttttttttttttttttttttttgtagagaaagggtcttggtatgccgccagggcttggctagaactcctggcttcaagtgatcctcctgctttggcctcccaaatgctgggaatacaggcgtgagccattgcacccagcctgttttttaatttaaaacatttttattggttttaacattttttttctttttgagatggagtcttgctccatcacccaggctggagagcagtggtgcaatctcagctcactgcaacctccacctcccaggttcaagtgattctcctgcctcagcctcctgagtagctgggactataggcttgcaccaccacgcccggctaatgtttgtatttttagtagagatgggatttcaccatgttggccaggctggtctcaaactcctgacctcaactgatccacccacctcaggtgatgtgcctcccagaatgctgggattacaggtgtgagccacctcactcagcagcttgaattttttttggtggggaaggacagagttttgctcttgtcacccaggctgaagtgcaatagcacgatctcggctcactgcaacctccacctcccaggttcaagtgattttcctgctccagcctcccaagtagctgggattataggcatgagccaccacgcctggctaatttttgcatttttagtagagacgggattttgccatgttggccagggtggtatttaactcctgacttcaagcaatccgcctgcctcggcctcccaaagtgctgggattataggtgtgagccactgcgcccggcctcagtcatttctgcacccagggtcccctcaagcatcacaccactctccagagactcatgcagacacatgcatccggatgtgccaacacccggagactcagtcataccaacctggagatctgaactcacagttgtagcaacagtcagagatgtacgcagagcatctcccaacacccacaatctcagacagtcattctaacacatggcgtctcacagagttacactaacacctagggaaacacacactcagccatgccaacaccctgcagctcacagatggcaccactcccacacccataggctcacacaagccatgtacgtagttactcatgggcctctcaaatgcagtggacccagcaccaaggacacactaacacacctgggtgctcgcctgcactcattcatcctgggttctgccccagccccgaggggtttccctgggagggtgggtgggtagactgctgggccctggtgtccccctgcctgcctgtctgctggcccccagctccccctcctccatgccccaggggcaatgcccaggctgggctgaggatgaagcctcccaggcaggccgaggtgaggatgcgtggtgactctctcccacctgtcgcctccagatggcccccagtcccctggtgcgggtggccccacctgctcggccaccaacctgagccgcgtggcgggcctggagaagcagttggccattgagctgaaggtgaagcagggggcggagaacatgatccagacctacagcaatggcagcaccaaggtgaggcagcacgtgcacacacactgtgtacacacaccacacctgtgtgcgtacagtccacccacatgtgcacacctacctgcatgtgtacacatgtgtccctgtgtgcacacgcccactcaaatgtgcacccacacctgcgcatgcacaccccacacgtgcacacccatccgcatgtgtacacacctgtccacgtgtacacacacccactcaagtgtgcacccacacctgtatgtgcacacactcactggcatgtactcccacatctgtacatgcacacacctacctgcgtgcatacacgctcacccacatgtgtacacacccctgcaaatgtgtacacacatatgcatacacccaccacacgtgcacacacctgcatgtgtacacacccttgaacgtgcacacacagctgcacgtgcatgcatacttgcacacacccacatgtgtgtataccagcatgtgtacatacaccccccatgtgcacacacacctgcacatgcacacacacctgcctgtgcacctgcacctgcatacacatttgcaatgcacatgcacatgtacacacccacacgtacacacccacccgtgtatctgcacacacaccgcacatgtatgcacatgcctgtgagcagatcacaggctgggggcatagggtgcagcctacagctgcccccatgggaggctgggagcctttggattggggacatactggctgatgggtgtaacttggtgtcaggactaaggcacaggcagctcatgggggcatatgggaagcatgactatgggtgatgtcagacagacgtggcaaattgtctcccctcctcccacagtcccctgcagagcctcaggcccatccacagtcagggcaacatgccgcctctcactgctgacggtgtgtcctgttacaagcacacacagtcatgtcataccttgacacacacacaccatcataacatctagacacacacacacacatgctgtcataacatctagagacacacagtggtaacaacatctagcaacacatggagaatcccaccacagccacatctggacacacacacacactcttacattcatacccagagactggtgcacagacacacacacatcccccgtcctgccaatcagtcccaggaacacacaggtctctatcaacacccagaaattctgacaccacaagcacaggccaacctacagctagaggattaatgtccagacccacaggctggtgtgcgcatgtccttccacgtgaatgtcacatgggaggacagactgcatggatttttttaatgacactattttatttattttttgagacagagtctcactctgtcgcccaggatggagtgcagtggcgtgatctcggctcactacaacctccgcctcctgggttcaagcgattctcgtgcctcagcatcccaagtacctgggattacaggcgcatgccaccacgtcccgctaatttttgtatttttagtagagatggagtttcaccatattggccaggcgagtctcgaactcctgacctcaggtgatctgcccaccttggcctcccaaagtgctgggattacagatgtgagccaccttgcctggcctaacattattttatttatttaatttatttttatttttattgagacaggggtctgtgttgcccaggctggactcgaactcctgggctcaagcattcctcctgccttggcctcccaaagtgctgggattacggatgtgagccactgcgccccatttatcaattggtggacatttggttgtttccacctttttagcgattgtgagtagttttgctatgaacacctgtgtacaagtatttgaacaccattctatgaaaatttaaaacctagatcaattgtatatcttttacatgtatctgagcgttatacaaaaaaagaataagagtttctcaccccctaagaatttctgccccccgccctgggggtaatactgacccagtgaaaatgaatagagtaggccaggcgcggatcccagcactttgggaggctgaggcaggcggatcacttgaagtcaggagttcaagaccagcatggccaacatggtgaaacccgagctctactaaaaaaatacaaaaattagccgggcgtggtggcacatgcctgtaatcccagctactcgggaggctgaggcaggagaatcgcttgaacctgggaggcagaggttgcagtgagctgagatcacaccactgcactccagcctgggtgacagagcgagattatgtctcaaaaaaaaaaaaaaaaaagctgggcatggtggtgggcgcctgtaatcccagctactcaggaggctgaggactccatggactacatcatgccactgtatccaggaatgcatggaagtacatttatttacttatttatttattttgagacagggtcttgctctgtttcccaggctggagggcagtgatgcaatctcagttcaatgcagcctccaactcctgggcttgagtgatcttcccacctcagccccctgagtagctaggaccacaggtgcacaccaccacgcccagctaatttttgcatttttttgtggagacaaggtcttgccatgttgcccaggctggtctttaactcctgagctcagcagtccacccgcctcagcctcccaaagtgcggggattacaggcatgagccaccgtgcctggcctgcaaatgcatgttgttacatccacatgtgaacactctgccacagtcacctaggacctgcatggtgtggctagaccccaaccacctagccttcctctctcagactgtctctgcctccaggaccggaagctgctgctgacagcccagcagatgttgcaggacagtaagaccaagattgacatcatccgcatgcaactccgccgggcgctgcaggccggccagctggagaaccaggcagccccggatgacacccaaggtgagtcccttgcttccaggcagcttagcctgcatctcgccttgcagggctcagcctccagctccataatgagtccctttctggggcagggaggtgggtcctgtgacccactgtgagacttcaacacattcctgaccctctctgggccagagcttcccattttgtcccatgcaaagtttggattacatcaggggttggtaaattaccaccttcagaccaaatctatccattgtcttttttttgtcaataaagttttattggtacccagccacgcccattcatttactatgtttttgactgcctgactattctgaataatgaccctggcacttggtcacagagagtcagacactcacagtcacactgtgtccacatgtgtcactcacctggacaccaataacacagacacagttccaaggaagttgatagtcacaggtatgttgccttataaacacagtctcggctgggtgcagtggctgacgcctgtaatcccagcactttggaaaccgaggcgggcggatcattcgaggtcaggatttcgagatcagcctggccaacatgatgaaaccctgtctctactaaaaatgcaaaaatcagctgggcgtggtggcacgcagctgtagtcccagctactcaggaggctgaggcaggagaatcacttgaatccgggaggcggaggttgcagtaacccaaggtcgccccactgcactccagcctgggcaacagagtgagactctgtctcaaaaaaacacacacaaaaaaacacacagtctcactgtcacccctagacctgctgccacatggcgctttatcagtcactgggacttttaggaataaagtcatccagtcacccatccttgcgacaacacccagagacaaaggaatgtgtgatcctaccatcacacatagtcactgtgaagtccatgtggatatccacagtacaggcacacaatcacgtgcaccgtcgcactgacacacactgcagggacacactttttttttttgtttttttttttagatggagtctcgctctgttgcccaggctggaatgcagtggcacaatctctgctcactgcaacctctgcctcccgggttcacgccattctcctgcctcagcctcctgagtagctgggactataggcgcccaccaccacacccggctaaattttgtatttttttttgagacggagtcctgctctgtcgcccaggctggagtgcagtggtgtgatctcggctcactgaaagctccgcctcctgggttcatgccattctcctgcctcagcctcccaagtagctgggactacgggcacctgccaccacgcctggctaatttttttgtatttttagtagagacggggtttcaccatgttagccaggatggtctcgatctcctgatctcatgatccgcctgccttggcctcctgaagcgctgggattacagacttgagccaccacgccctaccaattttttgtatttttagtagagacggggtttcaccatgttagccaggatggtctcgatctcctgacctcgtgatccgcctgccttggcctcccaaagtgctgggattacaggcatgagccaccgtgcctggctgacacactttttttgtttagacagggtcttgctctgttgcccaggctggaatgcaatggcgcgatcataactcactgcaggcttgaccttctgggctcaagcaatcctgctgagtagctgggaccataggcgtgtgccaccacacccagcttattaaaagaaattttttttttgtagagactaggtcttgcccaggctggtctcaaactcctgacctcaagtgatcctcctgccttaccctcccaaagtgttgagattataggcgtgagccactatgcctggcctgtgccccttttcttgaccctgtgcttgggcataaatgcatttgtgtctgtgactgtgtttctctgcccctataatggtgtccctgtgcccaagatgacagggccgtgtctgtgtaacagagtctgactcatgacagtgtctctatgtggcagggtgactacatctttgtgacagagtatgtgttcctctggtgatagtgtgcctacgctggtgacaaagtggtaatgccatgtgtccctgtgggcgacagtgtgacagtgtcagtgcgacagtgcctgccttactctccttgggccgccataacaaagtcccataggctgagtggcttaaacaacagacatttatgtttttcacagttccagagactggcagtcccagatcagggtaccagcatggtcggttcctggtgagggcgctcttcctggcttacagatggcttccttcttactgctccctcacagggagaaagagccttagtgtctcttcctcttcttatttttcattattagttttttgagacagggtcttggtctgtcacccaggctggagtgcagtggcgtgatcacagctcactgcagcctcgactttctgggctcaagtgatcctcctcgttcagccttctaatagctgggactacaggcacacgccaccatgcctcgctaatttattttttatttttagtagagacaaggtctctctatggtgcccaggctggtctcaaactcctggcctcaggtgatcctcctgcctcagcctcctaaagtgctgggattacaggcgtggaccactgcacccagcttcttcctcctccaataagcgcgctaatcgcatcatgatggccctccctccatgacctcctctaaccctaattacctcccaaaggcacttggagaagtccaagtgccatcccactggggattaggggttcaacataggaatttggtaggagacaaacattgagtctcttaacagtgtctttgtgactgacaccgtctgtgtaaatgtagtatgctgtggttgtccagatgtccatgagtgtcaccatgcctggttgactgtgtaacctggtgactgttcattggggaatgaggtgtgtcaacacgggtatgacagtattattatttttttttaatgacttagagtctcactctgtcacccaggctggagagcaatggcgcaatcttggcttactgcaaccaccgcctccggggttcaagtgattctcctgcctcagcctcctcagtagctgggattacaggcatgcgtcactgtgcccagctaatttttgtatttttagtagagagggtttcaccatgttggtcaggctggtctcaaactcctgacctcaggtaatccacccgccttggcctccgaaagtgctgagattacaggcctgagccgccatgcttggcctatgatttagatgttcctgtctgtttgggtgacagcccctgggtgacagtgtctgaatctagataatgtggctgtccctgggggccacaatgtgcctgcgtctgtccctgtgcaaatcactggaggtgaagagggaccgtgacaatgtgtgtgtcggtaagcgtggggtgacagtgtgcctgtgtgtcattgctcagactgtcccctgtaacagggtaactttttccctaggactggccctgtgagtgatggtgtttggataaaagagtctgggtggaagtgtggctgcctgcaggtgacagtgcgacagtgtcactgtgcctgccccttggatgaagcgtgatgcatcttcatgatggtttgtctgtggcccgtgcctgttcctgcgaatggctgtgtctgcgactaggttggtggggcgctgcaggctagcctcactgccctgtattccacgctcacagggagtcctgacctgggggctgtggagctgcgcatcgaagagctgcggcaccacttccgagtggagcacgcggtggccgagggtgccaagaacgtactgcgcctgctcagcgctgccaaggccccggaccgcaaggcagtcagcgaggtgaggggcggagctttcattagaggcggggcttcagcaaggggcggtgcttcagcaagcggcggggagttcaccaggaacacccacggtgaggggtggagcctcaaagggggtgggaccttcataaggggtggggcctcagccagggtagactactgtgaggggcagggcatcaggcaggaacagtgcaactgtgaggggcggggcctcagcgagggggcatggtttcaggcaggaatggccctcggtgaggggaggggcctctccaaggggcggggcctggttttcccagaggtgggaccaagttggtttgaggtttagccctctagggaggagctcagtgtgagactcagcctgggggtggggcctaggcctgcacttgggaaggggcaagcctggtcccgcccccagcccccacacttcccaccacaggcccaggagaaattaacagaatccaaccagaagctggggctgctgcgggaggctctggagcggagacttggggagctgcccgccgaccaccccaaggggcggctgctgcgagaagagctcgctgcggcctcctccgctgccttcagcacccgcctggccgggccctttcccgccacgcactacagcaccctgtgcaagcccgcgccgctcacaggtgggtctgagaccctaccccacccctgcagccctgggcctccgactcctctcatttccccattcctgtgacccccgacttcaatctccgctctccccaaccctggactcccattccaccactgtctcctcccctcctttgccctctgattctgggctcttgcccaccccccccacacctcagtttctccatctctcttcacctggcccagtatttttctcccagcccttgttccccagccccacctcggcctcacaacgctcagccatgagcctcctacccgcctgctgcagaccagccagccccaccttccacagacccctcagccatctacccctccagaccagccccaccgtagacccctagcccatcttagacctcagattgtccaccgagtcctcccctagaacccctagtcctaccctgttcctgcttgcctgggcctacggcctgtaccctgagcctacggcctgtaccctgagcctctcttctgcccctaaactcccgcatctgagcccctcctggaaggactgcttctctcatattctcctatcccagcacggacatcccggcctcatgccccatgctccattctggttgtccctcactggctcccacttgtaccatggctgcgtctggatgtgtcccctccccgctgtggtcccctccgctcagcctgccccagaagtggccccctgctgagctttcccctcctgcagggaccctggaggtacgagtggtgggctgcagagacctcccagagaccatcccgtggaaccctaccccctcaatggggggacctgggaccccagacagccgcccccccttcctgagccgcccagcccggggcctttacagccgaagcggaagcctcagtggccggagcagcctcaaagcagaagccgagaacaccagtgagtgggcatcgtgggccctgagaaacgaggtggcattggggacctggaatgccccatatttgtaaacctttaaaaaataagccaggggtcgggtgtggtggctcacacatgtaatcccagcactttgggaagccaaggtggacggatcacttgaggtcaggaatttgagaccagcctggccaacatggtgaaacactgtctctacttaaaaatacaacttagctgggcatggtggtgcacacctgtaatcccagctgtttgggaggcttaggcaggagaattacttgaacccgggaggtggaaattgcagtgagccatgatcacgccattgccctccagcctgggtgacagagtgagactttgcctcaaaagagaacgaaaacaacaacaaaaacaaaaaaacaggccaggtgcagcagctcatgcctgtaatcccagcactttgggaggctgagacaggaggatcacttgaggccaggagtttgagaccagcctgggcaacatagcaagaccctgtctctacaaaaaataaaatgtaaaaattagccagatgtggtggcccacacctgtagtcctagctgttctagaggtgggaggatcacttgagcccagtgagctatcattgagccatttcactctagcctagatgacagagagaccctgtctctaaattaaaaaaaaagaaaaaaaacttcaagtttatttagattaaaaaaaaggctgggcgtggtggctcacgcctgtaatcccagcacttggggaggccgaggcgggtggatcacgaggtcaggagttcaagaccagcctggccagcatggtgaaaccccatctctacaaaaaatacaaaaaaattagccaggcgtggcggcgcgtgcctgtaatcccagctactcgggaggctgaggcagagaattgcttgaacccaggaggcggaggttgcagtgagccgcgattgtgccaccgtactccagcctgtgcaacagagcaagactccatctcaaaataataataataataataaataaataaaacaaatttaaaaagaaaggaaaaccaaacaagaaaccaatatatcatattcattaggatgactaatactattttaaaaacccaacaaaacaaacagaaaataagtgttggtgaggatgtggagagaaatcagaacctttgtgcactgttggtgggaatgtaaaatggtgcagccctatggaaaatatattggcatggccgggtgcagtggctcacacctgtaatcccagcactttgggaggctgagggggccagatcacctgaggtcaggagttcgagaccagcctggctatcatggcaaaaccccgtctctactaaaaatacaaaaattagctgggcatggtggtgtgtgtctgtaatcccagctactcagaaggctgaggcaggagaatcgcttgaacccaggaggcagaagttgcagtgagcttagatcgagccactgcactccagcctgggcaacagagcgagactctgtctgaaagaaagagagagagagggagggagggagggaggaaggaatattggcagttcctgaaacaagtaaaaacagagtaagcagtccaggcgcaatggctcacacctgtaattccaccactttgggaggtcaaggtaggtggatcacctgaggtcagaagttcaagaccagcctggccatcatggtgaaaccccatttctactaaaaatacaaaagttaaccgggcttggtggtggtgcacgcctgtagtcccagctactctggaggctgaggcaggagaattgcttgaatccgggaggcagaggttggagtgagcagagatcatgctactgcactccagcctgggtgacagaatgagactccatctcaaaacaaacaaacaaacaaaaaaacaagagtaaccatatgatccaaagctacttctgggcatatccccaaaagaattaaaaacagggcctcggacattccataatgcatacatatttcaaaacaacatgttgtgcatgataaatatatataatttttatttgtcagttttaaaaatagtgatagaaaaatatttaaaaaaaaaaaaaagggtctcagagatatgtatacctgtgttcatagcagcattatgaaagccaaaaatggaagcaacccagatccaccaatagatgaatgggtaaacaaaacgtgggccagccatgcaatggaacattgctcagatttaaaaaggaaagaaatcctgccaggcgcagtggctcatgcctgtaatcccagcactttgggaggccgaggcaggtggatcacttgaggtcaggggttcgagaccagcctggccaacatggtgaaaccccatctctattaaaaatacaaaaattagccgggtgtggtggcacatgcctgtaatcccagctactcaggaggctgaggtaggaaaaccgcttgagcccaggaggcaggcgttgcagtcagccaagatcatgccaccgcactcctgcctgggtgacagagtgaaacactgtctcaaaaaaaaaaaaaaaaaaaaggaaaggaatcctgtcttatcctgcaacacggatgaatcttgaggacattagtctaagtgaaataagccagtccccaaaagacaaatattgtatgattccagttatatgaggttcctagagtagttagattcatagagacagaaagtagaatgatggatgccagggagtagagggagggggaatggggagtttattatttaatgtggacagagtttcagttttgtaaggtgaaagttctggagatggatggtggtaatggttgcacagcaatgtgaatgtacttaatgccactgaactggatggacactttaaagtgattatgatggtaaattttatgttacatgtattttaccataattttttttttcttgagacagattctcctctgctgcccaggctggagtgcagtggcaccgtctcagctcactgcaacctctgcctcctcggtttgagcgattctcttgcctcagccaacccaaatagctggtgggattacaggcgtgcgccaccacacccggctaatttttgtatttttatggagatggggtttcaccatgttggccataatttttttaaaagaaaatttgattcgtaatctcatggcaaaaaaggaaaaagaaagaaaattaatacgtatgtacaaaaaaaaaagggagtgtggagaagagtaacaggagagcagacacccatattaccaccacctgcgttaggaaatagaatatggcagccaggtgccacggctcatgcctggaatcccagcattttggtatttgtaggaggatcacttgaacccaggagttcaagaccagcctgggcaacatagcaagaccttgtctttacaaataatttaaaaattggggcatatggccaggtgtggtggctcacgcctgtaatcccagcactttgggaggccgaagcgggtggatcacaaggtcaggagatcgagaccatcctggctaacacagtgaaaccccaactctactaaaaatacaaacaattagccaggcgtggtggtgggcgcctgtagtcccagctactcgggaggctgaggcaggagagtggcatgaacctgggaggcagagcttgcagtgagccgagatcgcgccactgcactccagcctgggtgacagagcaagactctgtctcaaaaaaaaaaaaaattgggggtacatgtcatcaggccctcctgaatctgtgtcacagaaaaaaaaactaaagggaaaaaaagagaagacaagccaaccaaaaattaaccaggcgtgggcatggtggcttgtgcctgcggtcccagctacttgggaggctgaagtgggaggattgcttgagcgcaggaggtcaaggctacagtgagctgtgattgcaccactgcattccagcctgggcaactgagcgagaccccatcttaaaaaaaaaaaaaaaggaaaagaaatagaatatttccagctctccagaagccccctcttgtctcctccacaattccatctccttcctctgccatagaggtggctactctcccgacttttatcatttccttgctataatttgtagttgtagaaccccatgtttgcatccccaaaaacttttgtttaattttgcctggtattagaactttatattgacaggctcatacagactattctatcacatggcttctttcattcaacattgtttaggggctaggcatagtggctcatgcctgtaatcccagcactttgagaggccgaggtggagggattgcttgagccaaggaatttgaacccagcctgggcaacatggtgaaaccccaccctacaaaaaaatgcaaaaaacaaaaccaaactaaaaaaagcattgttttggtagactcatccattttgttgtgacaagctatagttaattcatatttattcctgtttagtaatccattatgttagactgagccatatcgaattgcctctttctgaaagcaaaaaaatagttaaatatcagcaatttcgtacttcagctactaagatggtatagcagttttaaaatattaattctcctgttaatggactgtgggatgcctctattttggactgttacatacactttatataaatgcatctcctgatgtatacccacatgcatttggctagggtaaatcctcaggagtgcctgggcgcggtggctcacgcctgtaatcccagcactttgagaagccaagaccagtgatcacttgaggtcaggagttcaagaccatcctggccaacgtggcaaaaccccatctctactaaaaacacaaaaattagctgggcatggtggtgtgcgcctgtagtctgagctactttggaagctgaggcacgagaattgtttgaacccagaaggtggaagttgcagtgagccgagattgtgccactgcactccatcctgggtgacagagagagactctggctcaaaaaataaatgaataaataaatccttaggagtatgtggctgggacttccatgtagaataaaattgaatttggatccctgcctcacatcacaccatgtaaaaaaatcaactggattaaaggcttcaatgtcaaatgcaaaactttacagtgggagaaaagttatggaggggaggattcattttaaaaagatagcagacagctaggcctggtggctcatgcctgtaatcccagatacttgggaggctgaggcaggagaatatcacttgaggccaggagtttgagaccagcctgggcaacataacaagactcatctctactgaaaaaaaaaaaaaaaaagaaaaagataatagacatgcccctttctgccaggattttctttctttttcttttttttttttctttttttttttttttgagatggagcttcactcttgttgcccaggctggagtgcagtggcgtgatctcggctcactgcaacctctgcctcctgggttcaagggattctcctgcctcagcctcccgagtaactgggattacaggcatgtgcaaccacgcctgggtaattttttatttttagtagacatggggtttcaccatgttggtcaggctggtctcaaacttctgacctcaggtgatccacctgcctcagcctccgaaagtgttgagattacaggcatgagccactgtgcctggccgtttttattttctcttctcttctcttctctcttttcgaccgagtcttgctgtgtcacgcaggctggagcgcagtagcacgatcttggctcactacaacctctgcctcctgggttcaagtgattctccttcctcagcctcccgagtagctggcattacaggcgcgtgccaccacgcccagctaattttttgtatttttagtagagacggggtttcgctatgatggccaggctggtcttgaactcctggcctcaagtgatcgcctgcctcaacctcctaaagtgccgggattacaggcatgagcaaccttgtctggctactgccagcattttctgactgggccctctctcccatttcaggtgaagtcagcactgtgcttaagctggataacacagtggtggggcagacgtcttggaagccatgtggccccaatgcctgggaccagagcttcactctggagctggaaagggtgagctgcgttggaggacagcagggcctagaggaggaggggttccatgcctctggcaccctgagtgatggccctcttcctctccctccaggcacgggaactggagttggctgtgttctggcgggaccagcggggcctgtgtgccctcaaattcctgaagttggaggatttcttggacaatgagaggcatgaggtgcagctggacatggaaccccagggctgcctggtggctgaggtatagcccacacctgaccctgagaaaatgcttcttctccctcactgccccattcccagtttcctagaaggggaaaatatgttttaggtctggctcttccagaaggggaagataagttttaagtcaggcttttctagaagaggaaaatagattttagatccagctcttctagaaacggaagatatgttttaactctgccttttctagaaggagaagatacgttttaggtcaggctcttccagaaggggaagagacgttttaggtctgcttttttctagaagggaaagatatgttttagatcaggctcttctagaaagggaagataggcttttgatctgcctgttctaggctgggcgtggtggctcatgcctgtaatcccagcacttcggaaggctgaggcaggaggatcacctgaggtcagggagaccagcctgggcaacatggtaaaaccgcgtctcaactaaaagtacaaaattagctgggcgtcgtggcacatgcctttagtcccagctacttgggaggctgagacaggagaatcgcttgaacccaggaggcggaggctgcagtgagctgagatcccaccactgcactccagcctgggcgacagagtgagactctgtcgcccaggagtctcacaaaaaaaaaaaagatctgcttgttctagaaggggaagatacattttagatcaggctcttttagaagcataagatatgttttagatatggtttctcttaatacagaaagatagttttagatcaggctctttcagaagtggcaggtatgttttagacccgtgtattctagaaggggaagatacattttagatctgtctctgaaccttgatagaaaagtacaccttggccaggtgtggtggctcacgcctgtaatcccagcactttgggaggctgaggcaggtggatcacttgaggccaggagttccagactagcctggccaacatggtgaaaccccatctctattaaaaatacaaaaattagctgggcatgatagtgggtacctgtaatcccagctacttgggaggctgaggcaggagaattgcttgaacccaggagacagaggttgcagtgagctgagatcacgccattgcactccagcctgggcaacagagtgagactcttgtctcaaaaaaaaaaaaaaaagaagaagaagaagaagaaaagcacttctaattagccacatcagtgataggaccttagctgggattggttttgttctgaggcaagatacttaaaaaaaaaaaaaaagaagaagaagaagctgatttccaaatttagaaatgtttaaagaaaaaaggaaataaattataaaatttcttccaaccaggaaagagatacaaaacctggcaacatatcgtggtgattgctaccagagccacagtcaagagaaagtgattccttccacagctgtgtgagggtgaaggtctgaattgaggtggcctacccttggcactgttgacatctggggccacatcatcctctgtggtggggctgtcctgcatactagaggatgtagcacctctccccactgcttacaggatgtcagtagcaccacctccccctgagttttgacagcccagaggtctccagacactgtcaagtgctccctggccgggaacccctggtctaaatgacatttctagctgagttctcatagtataagccaggctctgtagcgagtactttggcgacgtgaactcattaattctcacaaccaaccaacaaaagagggactgttattactcaaatttgacagaggaggaaactggggcacagagaaggggcacttgacccctcatttagccaaattatcctaaaaaactcttttaatcttccgctaacctatatgtgtaccccattttacatatatatatgatagattacctatatatgtatacacacacatattatctattatttacccacctacgtgtccatccatccattttgtctgtctatgcattcatccatccatcttttttttttttttttttttttgagatggagtctcgctgtctcccaggctggagtgcagtggtgcgatcttggctcactgcaacctctgcttcccgggttcatgccattctcctgcctcagcctcccgagtagctgggactacaggcacccgctaccacgcccggataattttttgtatttttagtagagacggggtttcacccaccgtgttagccaggatggtctccatctcctgacctcgtgatctgcccgccttggcctcccaaagtgctgggattaccggcgtgagccaccgcgcccggcccagccatcttatcaatgcatcctctatccattgatagatacacctatattatctgtcttatctatgtatccatctatattaggtatctatatcatctatttatctaatccatctatccatttatctatctctatctatatattatctatcaaccaatctatttttccatgcatccgtctctattatctgtcagtcatcttatccatcaatcttatgtatgcatcatccatccatctatccatccctgtatatttctctgtatatatatctacccattcctctctctatctctatctatccctctctatatctatctgtgcctctgtttttctctatatagctatatctatctatccatccatctatattatctatcaactaatctatctttccgtctacccatctgtctatattatctatccatctatattatctatctatcatcttatccatccatccatttatcttatctatgctcatccctccatccatccatctctgtatattcctctatctctatttatatccacccattcctgtctctgtctctatctatccctctctgtatctatctgtgtctctctctctttttctctcgatagctgtatctatctatccatccatctatccatgcatccttctctttctatgaatccctttctctatcagtccctctctctttctctatctgtaactacccttccgtccatgcccctctctatctacctgcgtctatatctgtctctttctgtgtctatttatccatctctctatatccatatccctaagcagaggttctcccctggtctgaccatcaagcaccagtgaaagaaaggggcggggccaggcacagtggctcacacctgtaatcccagcactttgggaggctgaggcgggcagatcactaagtcaggagttcgagactagcctggtcaacatggtgaaaccccgtctctactgaaaatagaaaaattagccgggtgtggtagcaggcgcctgtaatcccagctacgcgggaggctgaggcaggagaatcagttgaacctgggagatgaaggttgcagtgagccgagatcgcatcattgcactccagcctgggcaacaacagcgaaactctgtctcaaaaaaaaaaaaaagaaagaaagaaaggggcgtggagaagagctgactccagatggcagaggtttaaaattgttctcccattcagaacacagcccaaaccaaatggaaagtgatggtgggtggcctgggggacacattctaaagcgtttctccttgccttcaaggtctctctgtggcattctattttgtttttatgcctatacagaagcattcttccatagaacttttctgcagctctggccgggcgctgtggctcacgcctgtaatcccaatacttcgggaggctgaggcggatggatcatttgaggtcaggagtttgagaccagcctggccaacatggtgaaaccctgtctttactaaaaatacaaaaattcggctgggtgcggtggctcacgcctgtcatcccagcactttgggagggtaggcaggcagatcacctgaggtcaggagttcaagaccagcctggccaacgtggaaaaacctagtctctactaaaaatacaaaaatcagccaggtgtggtggcgcacgcctgtaatcccagttacttgggaggctgaggcaggagaatcacttgaacctgggaggcggaggttgtagtgagccaagatcgcaccactgtactccagcctgggcaacagagtgagactgtgtctcaaaaaaaaaaaaaaagaaattagccgggcttggtggtgggtgcctgtaatcccagctgctcgggagactgaggcaggagaatctctagagcctgggaggtggaggttgtggtgagcccagattgcgccactgcactccagcctgggcaacagagtctcaaagaaaaaaggaactttctgcagctctgttgtcgatgcacccacagtagctgagttctgttgtagatggaaatgttctctatctgaagtgtgaccagtgtgaccagggaaccaaagttttaatttcgctgacattttcactaatttaaatcgccacatgtgacaaccataccagacactgcagttctgtgacttcagcaccttctagaagttgtattggagttgggagaattcaacttgacaggtggcttccatagatgggtgggcaccagcattgcctgggggcttgttgaaatactgagtgctttagggccgggcacggtggctcgcgcctgtaatcccagcactttgggaggccaaagtgggcagatcgcttgagcccaggagttcaggaccagcctggccaacatggtgaaactccgtctctacaaaaatacaacaatttgccaggcatgggggtgcgtgcctgtagtcccagctactcaggaggctgaggtgggaggatctcttgagcccgggaggtggaggctgcagtgagccgagatcggactactcatatgtgcatatatatatgtgtgtatatatatatatgtgtgtgtgtatatatatatatatatagagagagagagagagcatgcgcgcgcttcctccactccatgtttctggctcagtaggtcaaacctgcgtttctagaaagttcccaggtgttgctgctactgcaggtctggggtctgggagcacatgtggggaatggggtgtgggatggcgtggcgtccgtttgcagtcgctgtctgtcagtcttgttgggtcagatgctctccccacctctagaaagggacccggttgtttgcttcttgcttttccaagacgtcccttcaggaggggagccatgggttgcaccgatgacctcttcattgtcacctggtactcgggttgaatctgatgccacgtgaccagaaccccacttgggcgcgcacacctgtgctcccaggggcttccttaccaagctgtctgcctgcaggtgggcagagggtcctcacattttggtcccttcccccaggtcaccttccgcaaccctgtcattgagaggattcctcggctccgacggcagaagaaaattttctccaagcagcaaggtgagagggtgctccaggcttcctgggggagaggccaggggtcctgggagtgtcatggagggtgacgcctgccccgtccccccagggaaggcgttccagcgtgctaggcagatgaacatcgatgtcgccacgtgggtgcggctgctccggaggctcatccccaatgccacgggcacaggcacctttagccctggggcttctccaggatccgaggcccggaccacggggtaaggaaggagggccccatggtcccggctgccccttgaagcctgcgagggtcctgggtcccagacacaccctcctctcgtctgctgcagtgacatatcggtggagaagctgaacctcggcactgactcggacagctcacctcagaagagctcgcgggatcctccttccagcccatcgagcctggtgagggtccccccttctatccccgtaggcctggcctgggcagcgtcaggggtcctgctccaggctcagagaccactaggaacttccctggagccacgcagcatgtctgtggcagaaccagggcccagatctctatgctggttaaaacgtgtgcccagatccccatcctggttaaaaaactgctcatgcctataatctcagcacttctgggaggctgacatgggaggattgctggagcccaggagtttgagaccagcctgggcaacacagtgagccactgtgagccatgatcctgccactgcactccagcctgggcaacatagcgaaatactatctcaaaaaacaaaacaggctgggcacagtggctcacacctggaatcccagcactttgggaggctgaggcgggtggatcacttgaggccaggagttcaagaccagcctggccaacacaatgaaaccccgtctctaataaaaatacaagaattagccgggtacggtggtgggcacctgtaatcccagctacccgggcaactggggcaggaggatcagttgaacctgagaggcggaggttgcagtaagccaagatcataccaattgcgctccagcctgggcgacagagcgactccatctcaaaaaataaaaataaataaaactgtgagctcagcggctggaccccctgggttcccacccctgccgtgccacctcttggctctgcgcttcacctctgtgcctcagtgtaccactttgcaaaacgagcatatttaaaactcatgtcaatgatagaatgatcgagagagtgctgttctctaggcagaggttaccgcaagctgggagccacaaggggacctgccgggtgatggaaatgttccttatcttgatctcggtcagaggtcagcacgcgttttccagaaagggccagagagtcaatatttttggctttgtgggctagacagtccctgtctgctttgtagtttgaaagcagccacagacgatatatgtacactgtaagcgtgtctctattccagtaaaaccttattggtagtacacgcggaagtttgaacattgtagaactttcatgggcaatgaaatattattcctttttttgtttttttttattcccccaacgatttaaaaatgtaaaaatcagtttacctgtggtcccagctacttgggaggccgaggcaggaggatgacttgagcccaggagttggagtctggcctgaacaacatggcaaaactccatctcttttttttttttttttgagatggagtctcactctgttgcccaggctggagtgcagtggcgtgatctaggctcactgcaacctctgcctcccaggttcaagggattctcctgcctcaaccacccgagtagctgggactacaggtgtgtgcccaccacacccagctaatttttgtatttttaatagagacggggtttcacctcgttggccaggctggtcttgaactcctgacctcagatgatctgcccacctcagcctcccaaagtgctgggattataggtgtgagtcaccatgcccggccactgcatctcttaaaaaaaaaaaaaatagtgaaagccattcttagctcttacaaactataaaaacaggctggcccaccagccagcatttgccaactcctaggctggctgatggtttcctgggtggatgcatatgtaacctgttcctcttgcccacctcactgaatgcattttatttatttatttattttgagacagagtctcactctgtcgcccagaatgggcgttggaatgcagtggcgtgatctcagctcactccaatctccgcctctcaggttcaaagatgcccatgcctcagcctccctaatagctgggactacaggcatgtgccatcatgcccaactaatttttggttttagtagagatggggtttcaccatgttggccaggctggtcttgaactcctgacctcaagtgttctcccctctgcagcctcccaaattgctgagatacaggtatgagctactgcacccagcctgaatgcattttatcttttatcttttttttttgaaacggggtctcgctctgccatccagggtggagtgcagtggcgcagtcatggctcgctgcagcctcgacctcctgagctcaggtgatcctctcacttcagcctcccaagtaactgggactacaggcgtgcaccaccacacctggctaattttttatagatctaattttttagaaagtagaagtaatgggttgggcatggtggctcacgcctgtaatcccagcactttggagtcaagagatcaagactatcctggctaacatggtgaaatcccatctctactaaaaatacaaaaattagccgggcgtggtggcgcacgcctgtaatcccagctacttgggaggctgaggcaggagaattgctggaatctgggaggcggaggttgcagtgagctgagatcacaccactgtaccccagcctgggcgacagagtgagactcagtctcaaaaataaaaaaaataataataaaaaatggacattgtcaagccaggcatgatggcttgcacttgtagtcccagctactcaggaagctgaacgaagaagatcgcttgaggccagaagtttgagaccagcctgaggaacagaacaagaccccatctctacaaaaattaggccgggcgcggtggctgacgcctgtaatcccagcactttgggaggctgaggcaggtggatcacctcaggtcgggagttgaagaccaccctgaccaacatggagaaaccccatctctactaaaaatataaaaaattagccgggcgtagtggtgcatgcctgtaatcccagctgtttgggaggctgaggtaggagaatcacttgaatccgggaggcggaggttgcagtgagcgaagatcacaccattgtactccagcctgggcaacaagagtgaaactccatctcaaaaaaaaaaaaaatgagctggacgtggtggtgcatgcctttagtcccagctactcaggaggcggaggtagagttggaggctgcactgagctatgactgcgcccctgcactccatcctggaagacagagcaagaccctgtctctaaaaaaaaaaattcaggttgggcatggtggctcacgcctgtaatcctggcactttgggaggccgaggcgggtggatcacctgagatcaggagttccagaccagcctggccaacatggtgaaaccccgtctctactaaaaatacaaaaattagccagccatggtggtgcaggcgtgtggctggaggagagtgagtgaggggctgcgtgggaggagaggtgaggacagagaggtcgggggcagatcttgcagggcctcggaggctgctgtggttatgagggcatctctgactccccttactctggcctcctctctccgccacagagctcccccatccaggaatccactgctcccgagctgccttcggagacccaggagaccccaggccccgccctgtgcaggtgacaccactccctggccccctgtccaccacccctgcccgctgtccttgttctcaccagtggcctctctccacagccctctgaggaagtcacctctgaccctcgaagatttcaagttcctggcggtgctgggccggggtcattttgggaaggtgaggtggagggcagggaattgggagaccccccaggtccctggctggccgctaaaaccacccctgcccactgtggttccaggtgctcctctccgaattccggcccagtggggagctgttcgccatcaaggctctgaagaaaggggacattgtggcccgagacgaggtggagaggtggggacctgccgtggtcctctggggacctctttcttctcttttgggaaatgacagagcagttctctccttggagctacagggagagtgactcatagtagtcactaacgccaggcacagtggctcttacctgtaatcccagcactctgggaggccgaggcaggtggatcacttgggctcagaatttcaagaccaggctgggcaacatggtgacacccccatctttacaaaaaatacaaaataattagctgggtgtggtggcacatgcttgtagccccagctactcatgaggctgagataggaggatcgcctgagcccagtaggtcaaggttgcagtgagctgagatcgcgccactgcactccagcctgggcaacacagtgagaccctgtctcaaaacaaaaagtcactaatacctactagcctaataccaagataataatagctcttaggaaagttattcatttgttcctccatgtagccctataagataaatactgatggcacagagaggttcagcaatttacccaaggtcacacagccagtaagcagcaggtccaggattcaaagctagagactcaggctctgaagcctgtgccctttgtggtgccaccatactgcctctgctttagggtcaggttcctgggttcaaatctcaattctgcagcatgggcttggagatcctggggaggtcacttctcccttcagaacctcagcttcttggctgggcatggtggctcacgcctgtaatcccagcactttgggaggctgaggtgggcagatcatctgaggtcaggacatcgagaccagtgtggccaacatggtgaaaccccgtctctactaaaaatacaaaaatcagccaggcatggtggcgggtgcctgtagtcccacctacttgggaggctgaggcaggagtatcgcttgaacccaggaggcggaggttgcagtgagccaagatcgcaccactgcactccagcctgactctgtctcaaaaaaaaaaaaaaaaaaaaaaaagaacccctcttgttgtggagaagcagaatgctattgccttccacacatggttgtcaggtgctctctacacagtgcctaacccctctaaacattcggtacaggcactgagattgtgcctggtcttcccagcatccttttgataatcaggaacccaactgagaaagactgaaacaagtaaagaaatttattggtctggatctgaaaagtccaggagtgtgctaccttcaggcatggctgtatccaggtgctgagatgacgtttctcagttctgcttccctctgtatgggctttggttgccatctgggagtctggagtaagtggcggccatggtctctgacttctatcccccacccctccccagcctgatgtgtgagaagcggatattggcggcagtgaccagtgcgggacaccccttcctggtgaacctcttcggctgtttccagacaccggagcacgtgtgcttcgtgatggagtactcggccggtggggacctgatgctgcacatccacagcgacgtgttctctgagccccgtgccatgtgagcctggaccccagcccgggcccctgcctcccctacagcatctgacacttagtccccccgagaggctggcagcctgcttctcacccctccaccctcaggccttgcttccctcagcctcccagagctttggggagactggggggcttttgaggatgtggaagccaggcttatgtgaccctccctccttgcagggtggccccacccctctcagcagcctctctctctctgcagcttttattccgcctgcgtggtgctgggcctacagtttcttcacgaacacaagatcgtctacaggtgtgtgcgtgtgtgcatgcatgtgcacactgcccgttgtggggacaggacccagacccccgctcatccctctttccacccctccaacccccaacagggacctgaagttggacaatttgctcctggacaccgagggctacgtcaagatcgcagactttggcctctgcaaggagggtgaggggctggcctctggattagacaaaggagggggaaggaatggggtccctaaccctattcggggtgccccccaccctgaccctgggacagggctggctgtgtggacaaccccacattgggctgagtgactcctctggcccccataacctcacatggccttgctgtccccagggatgggctatggggaccggaccagcacattctgtgggaccccggagttcctggcccctgaggtgctgacggacacgtcgtacacgcgagctgtggactggtggggactgggtgtgctgctctacgagatgctggttggcgaggtgagaccccgcccctgtgtgtctcggatctcattggaacctgcgcgtgcccagggtgggatccaagtctgcctccaccatgtgttgtgtgattgagggctgctggctctgcttccctggcctcagtttccacatctataaaatggggcatttccctgcccaagtaagccagcacccaagagctgcagcagagtgtggggctcaggccgggctgggtttggagcagccagaggaggggcctcgttcaccccgggcctccctctccccagtccccattcccaggggatgatgaggaggaggtcttcgacagcatcgtcaacgacgaggttcgctacccccgcttcctgtcggccgaagccatcggcatcatgagaagggtgaggacccccgacgtggggcgggcctggggaggggcagtggggcccaggaggggacagatcctgacacagtgctccttcctccaagctgcttcggaggaacccagagcggaggctgggatctagcgagagagatgcagaagatgtgaagaaacagcccttcttcagggtgagattccccacaaggacctcagtgaccccggccctcccccagggccgattcatcaccccacagcagacggcccccatgcctagccgctttgcctcaagggcctcgttgcgcctcaagggcctcgttgcacctccagggcaacatcgtcacctcctttgacacccccatttccctcctccacttttgttccccccaaggaccctcctaatcccacatctccacttttcccttttttttttttttttagccagggtctcgctctgtcgcccaggctggagtgcagtggctcaatctcggctcactgcaacctccgcctcccaggttcatgcagttctcctgcctcagcctcccgagtacctgggattacaggcgtgcaccactccaccacaccaggctaatttttgtatttttagtagagacggggtttcgccatgttggccaggctggtcctgaactcctggcctcaagtgatcctcccgcctcggcctcccgaagtgctgggattacaggcctgagccaccacgccgggcctccacttttcctaatccggcttctccaccaggctctcgcaggtgatccctcctgagccccagtccccccaccccacttgtcctctgtatgctcactcctctccgtggtccccgagccccaggactggtccccactgcagcacgccccctcctcagcctccaggctgaccctcccctccgcttccctcccctgcagactctgggctgggaagccctgttggcccggcgcctgccaccgccctttgtgcccacgctgtccggccgcaccgacgtcagcaacttcgacgaggagttcaccggggaggcccccacactgagcccgccccgcgacgcgcggcccctcacagccgcggagcaggcagccttcctggacttcgacttcgtggccgggggctgctagccccctcccctgcccctgcccctgcccctgcccgagagctcttagtttttaaaaaggcctttgggatttgccggatccttgcatcctccgtgtcttcttgtgtgcagtcattgggggtgggggcgtgcttggaggtgtggacgtttgcggggcaggtggctgggtggtcgtgggagtctcgactgatgggggtgtcatctgaagaggatcaaggggcggcgtggactcggggctgttcttatggtggggagcgtgggtgagccgagatgggagggggcgtcgggattgtgttggggggcgcccaggggcgtggggcaaaatggtttggggatagggttttggggctgtattggaagagctcaaagccgcagtgagcagaatggtttcggaagtccgttagggcagcggcaaggtcaggaaacgccccacacaccctctgtctctgctcccagcggagccccagccccggccgcccgcacggtgcgcttgctcctgcggctctggcgcccacgggcccggcaccctcgaacctcctagaaccgcgcccccgtgtctccgcgccctcttctggtaggccccggaactgcatccaccctggaggcgcacgcggcgtccctgcagccccccgcgcggccccagtggatgccgaagccccgacgggacacacggtcctgcctgggctcgcagaatggctttttattcccaaaggctctgcgccgcgcacctgggcccagcccagggtgggctggcttagtcgttgggcctctggttgtgcttagaagtggctgaggccgctgtgccgggagctgcgcagcgagctggcctcccaggcgctcggtgttaggcccagccccgcggggccgcccttggctccggccctcgggggcaagaggcgaagcagttggcgcagcacggcctggcgcagtaggatgtacacccaagggtccaggatctggttccaggaggcaaggcgcacggccaggaacagtggccgctgcagggaggtagagctccagccgccgacggccagcgccaccaacacctgcgggggaagccggtgtgagctatagagcaggcgcgggcgcaggggggcgcagggatggtgggggcgtggctggaaggtaaaagcctgggaggaggggcgagccgtcgcagggagggtaaatggggatccagatgagaaacggatgcggaaaaaaaaggggggcaaagaaacaaacaccttcagtgggtgggggtccggccgtagaggagtctcaggtgtcccggaaagaggaaaagcaagggggttgggtgaaaggactagggaatgaagcgcggcgacttataacggtggggcaggagaggaggcttgtgtgggtcggggtgcgctacaaagaccccaaaaaggaagaggagaggggggctaggaggaaggatgggaggtcagatggagaaggcgatgctggctttcggggcaggtggggcctctaggggccggggccttggttgagtccaggatggaggccccaggtgtcctgggacgacaaagggcgggagggtgccgagagggagcgggaaggagcgtggctcgaggggccggtgcgcccctcaccagcattgggctccagcagatgcacgacaccaccatgataccgacaagctggcccaccatctccacgtcgtgggcgcgagctctgcgtgccgagccgctgctccgagagccgccaaagaaggtggaggccgaagcgatggacgaggcggacgaggcggaggccgagcggggtccgtgcgccccccagcgacgccggctgtcggggcctgaggccgggggaggccgtcgggagcggcgtcgccagcgggcgcgtagcagggccaggccgctgagcgtgttgcacaccagcgcggcgaggagcgcgaccaggccgaggctggcgaagaggccagcaagcagtgcctggcgccagccgcccgggggacccaggccgatgaagcaccacgtgcccgggtactgcagctcatagcggcccacgcgcgccagcggcagcagcgccacggccaaggccaccgcggccaccgcggccagcgccaggcgcgcgcgggcgaccgagacccgcgcggcgtggagcagcggccgcgtgacgcccacgcagcgctccacggccatgccacagcccagcagcagcgggcacaggccgaagaagaccatgcagccgcccaggaagtggcaggccccgccggccggagcgcgccccgcagtgtacagacgcagcaccagcgcgcccgggatcacgtggcccgccaggtcggtggccagcaggctggccacgaacagcaggaaggtggcggccgagcggcggcgtcgcaggcggcccgcggcctgcgccagcagcgccagcgccagcaggttggacacggcgcccagcgtcatggagaagatgggcagcgcgggcgaagcgcccgacggcggcacggccgacgtgttggggacccagggcgccgcgcatgtggtcgcctcgcccgccaggctcaggttgaggggcccgcaagggctcatgtcaggcgccaggggtgctggatagaggagaggagggcagagtgaggctggctgggcccgggcggggaccagcccacggtgccatctcagaacatcagggcctgtttgactccatggcgttctcaggcggcccctctgcccatggcagttgccatgggcaactccaaatgacctggccactccatttggaaacccttctccctctcttttgcctctcaccaccccatctcctgctccagggcctccctctaaccccactggccctttctctgcccttcatggtttcctgcaagattccccccagccccgccctcaggcatctctgccagtgcctccgacccccaccttccatttttacacccagcaaattcctggggcctgtggctccatctgatagctctcacccatttctgccactgtggccctacctgactttccccatgtcagctttactccagtcccatcctcgatgccccagccccatctctaccaccacgggcacatctctccccacggccatgtccctgtcccccatggacccatctctgaccccacatggcacagccacatctgtgccatggacccatctctgcccctgccccatggacctgcctctgctccactgcggtctctcgccaggccctaccccgatcacctctgcctcaccctgggtgcccacggttccactccatatccctgccccagaggcctggaggcggccccacgaccatccactctttgatatcctggtggtgagggctgaaagggcggaactgcccaccaggccagatgggaagggaggatggacagacggtaagacagggacgcacagatcagggagaagagcccggggacacaggacggacagcaggtggccatggccccaccccttcatgccctcctcctccccaatcagggaccctcatgtgcaacccccttacccggcactgcctgggatgtggggtccccatcaccggccgctcagccctgccgcccactgcgccctggctctccggcaagccgcttcctccctccctcttcctggggcggctcctcagctcctcccgccgcccttgctggcctccaggggccgctccaccccgcgcacgcccgctgggggcctggagtggcagagacccccctctctgctcctggcaatgggcgggggccactctgggccccagcggctccctccacgaggagtgaggctccctggagttggtctggccccatgtgaccccctcctcccagcagggcgggagcagcccccttcccccccaggatcgggcctcttgcctcattaataaagcggataaaatctaaacactggaaaatgtgagcgtcgtctggggcgggctggggcagctgcagggggtgccactgcccccctccctggggctttggagctagagaggctaactccaattctgtggggccagcaatgccccccctgccctgccaaagccttcgtggatgtcggggtgggtgctggtgggcagggcctcgggtagaccagcttgggtcaggcccagcctggccaggggatccgcctatttatacaggggcttaagccccggctagggccacagcgagtcatatcctgggaggaggctgaaagggggcaggggaaccaggaggcctggcgacctggggactctccccagtgactggctcctttaagatgggctgagtgacacctgtgacacacgtcctaagacacaaagactcgcctcctgccctgagaagtagggtcacactggcacagcctcacaccctaagacatacaatcctgtcacttaccactcagtttcatcctgtccccatctcagcacagccaggttgctgccgccacatccctgaactcagggtcttacccccagcgccgggacgcacccagagttactgcctcaattccagcccctcccaacaccccaaaatgcagccctctgagatgatcacccgaaccaccctccttagtgctgggaaatagggtctcacttggcaccccgagagatacacacacgcacacacactccttattgccaaaactgcccctgaccacactctgtttgactttcaatgacccctcaacaatcccagacaggccccaccagcacactccgtacacccaaggcacaagaagtgacaccccccgccgctggacaccagagacctagctggccacccccaccctcacccagaaacagcaacgccctgagacacacacacctgcacccctagagacccctagacctagccagcacccccacccaggaaacagcaacaccccgagacataccctgacacccctgaacaccccaaggcctagccaagcacccctccttgccccagaaacagcaccctaagacacacacccccacaccccgggacaccccaagacacagtcactccgttgcactccccaccaccagacactgccagttacacctgcaattgccctggaacacagagccggttatcacatcccttacccacgacacagccctccctcattgcgtcacgagccatcaacactcttgatagactcacagtgctacccaacacccgagacacacatagccacaccccttcaccaccgcaagcggctcccagcacagacacctgaggagcccacaggtgcccggggatgccctgagtcaccaggactgcggctccccgactccacccgggtctgtccaccaacacccagcccccagggtcttccccttttcccccttcccctcttcctggtggcccagtgcccgcccgccttttggaacgaggattgcaagctggcctcggacttccccacagcctctcggctcacccccaagcattcctgtggggccttctggcccagcgccccttgcttcaatcccttcccttccctccaggtctggccagggtcccaccccgcctttccctgatcaccctcaatcctcgaagatgagtgggttgtcaaaacaagtatgctgggtttatgtctaggacaaagcagggtgccccatggacgcctgcgtgtccagcattgggccgggtggggtgggggctgcctcacgcctgcccccaacctcccggtgtaggggtggggctctggcaggcctgaggttccatctttctatttccaagccaggtttcaatgccctggtgctccccacggtccgggggttgtcaccagctgcagacagcagccttgtgaagctccagggggtaggaggccttgtgggagagggggcaggatttgaaccctcagtagtccaggaagctctggccctgcctggaagcctggtggcctgcagccagaaggaacagtgggagggggcaggtggcttggtgccagctcctaattcaatttggagcctgcggaagatggatttcagctgctgaattctttctcagccccaatcttccccctctcccaccccgaagccacacaggtccaacagcagatagattctttatgttcaagacagcaaattcagatacaaaaacccaccgccatcgtccctccctccctcctgctctgggccagggatgggcctggaaggagagatgggaggtggggaggaggttgcggggttcacagcagactcgtgtcaaatgcggaggtaacaggctccacagggagggggctcctctcaggaggggtgagggcattattgcatttgctggggggaaggacaaccctctcccctgtattccctgcgtcaggaaactaggaaggtcatgacccccaaacagaacccaaggccccagggagacagagggaccagtttggcagctgatggtggaaagtggtggaggcgggggtggccgcccaatttggctgatccctcccctccctgtgcctgacccagctgaggtaggtggggaacagggcacaggggggccggggaccccggccagactgggaaccagggaggggatggtaccgattggagcggggcagggggcctggccccacctcccctcaccatcgtccttgggctgctgagctaggctcaggctggaggctcgggtcctgacgtcagtgtccctgctgggggcccccaccaggttgcgcccgggtcatcatcgcagggtccgggggcagtcctagtagcggccgaccttggcgtccccaatggcgccccagacgtcaaagacgaactcgtcagggaaggcaaagtcacccagccgttcgtccagggcctcggccagctcatccgggttccttttgtcctttcccagctccaccatggtggccgctattgggggaggggtcagaacggaggcacaaatgacaccagggaccaaggggctcagggtggattcggcccccagcagacctagatgccccctcccccaggcagccctcactcacccagctccgtgtccctgatacccatgtaactctccagcaggtcatccaccttctcaatggccttctcttcaaaggcagagggctgggggccagggaggggtgacagcgacatcataacaatgtgaatatacatagtaattggacggactgccattgtcaccactttacatatattcgtatttagacctcaggacaaccctgagaaggtggtatcggtgttcagctcatccccattttactgatgggcaaactgcggcccatgtgcccaaggaaggtccctgggagctgggaagtggcagaagtggactagaatccaggctgtctgcccagagtcccctcagctaacaggtaatgctgccggttatgaaaaggaagggagggctgggcgcggtggctcatgcctataatcccagcactttgggaggccaaggaggctggatcacctgatgtcaggagttcgagaccaactcctggcctggccaacatggtgaaaccccatctctactaaaaatacaaaaatcagctgggcatggtggtgggcacctgtaatcccagctacttgggaggctgaggcaggagtatcgcttgaacctgggaggcagaggttgcagtgagccgagattgcaccactgcactccagcctgggtgacaagagtgagactctgtctcaaaaaaaaaaaaaagaaagggaagggatgccggagatagggtccggctggagcactcaccagatcctccaccgtggcggggccccgggatcggagccgcagggtccctcggccagtgcccagttgtgggccagagccagggcggccacccgctgaacgctggctgatcatgtctgtgggaggcaggagaggagtgagtgtgggggaagcttggttttagcacgttctgggcaggaacttgtccttcctggctttcaccaccaccccaaacttctccaggcttctgcaagtttctgggggctggggccggggtgatcccaggagggcaggaatcctgactcaggcctggcatggatgtggggcagagcagggggaacagctgggggccaggaataggaaatgctggaggggagactggaggggccacttctgctcccaggggctgggggacaggaagcaggtgtaccccagcctgagtctccagctgcctgagtccgtctcctcttggccaagggggtatggctgctgggccacagaccagccctacctgcccagggaagtgatttagtcccccacccccacctcaggggcctggggcccattcctgagagttagtgaagccagatggaaaagtgggggggctggcactgagcagtcaagcctggcctgttggggatagggggctggccagggctgagggcgcttggctgggctaatggcccctggaagctaggtgtgagggcaacttcctcctcgcccccgcccttctcccaggctgggccaagggccagcaccccgtctggggtcgggaggagctgcaaccccttccctttctgcaaccccttccctttcggcaggccaggcttgggcgccacctgctggccgctcccggcaccaccgcctgcgcccatgcgagcagcgccactggggaggtccagggggcggctcctcaccgaaggccttgcgaggctccgtgagcttcagcgtgaaggtacggcctcggggcagctccttgagcagccgggccacctcgtagtgccggcagcccagcaggctctgcccgttaatggcctcgatcatgtcgcccacgctgatgaggtggatgtggtcgatcacgctgccctccttgatgcgctgcgggggcggggagtcatcagcccttggggctctgccctggtttccggggtcccatggcccaccctcactcccaggcctccggggtgccccgtctccccaggcaccttgatgaaggcgtagccagccccgttgtccgtgatggtgagcccgagtgcatcctccgacttgaacacctccacctccttgcgctgccccttcacgtgggcgaagatgaagtcctccagcccgatctggccccccaggagcttgtccatgtccactttgtgggtgttcagggtgcagaacatcacctgcaggggtgggagacgctgaaacctcttccccctccctcccccttttctaatcaccactggagggcgaagggagagagctgggagaggactagggggattccatcccagtaactcatcacccactgagcctgagccagggccacagcagggcccacattagcgtgtcagctctgctaggactaggatttagttttcctttctctttttgagacagggtcttgctctgtcacccaggctggagtgcagtggtgccatcatagtcactgcagccacaacctcccagattccggcaatcctcccacctcagcctcccaagtagctggaactacaggtgctcgccaccatgcctggctaatttttgtattttttgtggagatatggggtctcactatgttgcacaggctggtctccaactcctgggctcaagtgatcctcctgtctcagtctcccgagtagctgggaccacagacacgtgccaccacacccacatagttaaaataattttttttagagatgggagcctcattatgttgcccaggctggcctggaactcctgagctccagtgatccccccatctcaacctcccaagtagctgggactataggtgtgcaccactgtacccagctaggatttcggtcctagcaaaaattcattgctgtgccaggtgcggtggctcacgcctgtaatcccagcactttgggaggccgaggtgggcagaacacgaggtcaggagatcgagaccaacctggccaacatggtgaaatcctgtctctactaaaaatacaaaaattagctgggtctggtggcgggcgcctgtaatcccagctactcgggaggctgaggcaggaaaatggtttgaacccaggaggtggaggttgcagagagccaagatcgtgccactgcactccagcctggtgacagagcaagactccatctcaaaaaaaaaaaaaaaaaaaaaaaaaaaattcattgctgctttcagggaacggagcctggcacacagtgagtgctcaggaaatgcttgtggaggacacagaaactcatcccacttagggagacccctgcgtctacttcttgctcaaacccactattgccctccttgaccccctcccatctatccccacagtgcttggcaccaggcaagcctgcctcccacagcgttgagtttctccaaggcatcacggagaagtgcatctcgtatctggcctctagcctccaccatctcatggggcactggcctcccaatgcctgacaggaactcagcatccagccctggccatcagctcccacagtctgtagaggtgcaggcctctcagtgtctgatgggaactcagcatttaactgtggccatcagctccccacaatctactggggtgcaggcctcccaacgcctgatgggaactcagcgtccagccctggtcgtcagttttgcacaatcgactgggatgcaggcctctcaatccatccatccaatcaatccatccagccctggcctcccacagtccattggagctcaggtctctcagtgcctgttgggaactcagcatccacccctagtcttgcacaatctactgggggtacacccctcctaatgcctgatgggatgtcagcatgcagccctggccatcagctcccacaatccactggggcacaggtctcccagtgcctgatgggaactcagcatccagccctggcctccagttccccacaattcacaggggcacaagcctcccagtgcctcatggggactcagcatccagcccaggccattggcccccaccactgagtggggcccaggctcagcatctgcagcttcagcatctgagccccagctcatgaacaggatgcaggcccagacctctggtccaccatcagggaccctggtgcccggctccccagtggatacctcggcagttggcaggcggaaggcctcggcgatcttgccatacagctccttgacgttggtgaagccctcgatgcggccagtgggactgccatgggccagctgggtgtggaacacgaggcggggccgcagggctgggggaggggggggcaagcccatttgggggccccccgacccacctccgcccagaggccctggctcccccacgcccagccctccacggcctggctcagcctcctcattttccactagagggggcgcctttttccgccgccccagtcccagcggcatgagcagcgagaagtggggtcaccagaagatctgcaggacaggaagtggggctcagggcctgggcagaggccttgggtgcccctcccacactactcgaaccatacaggcccaaggaaatactcagagaacaaattggcctcggttgaaatcctcatctcttgtatagtgacaggacacttatataaaagtaataatagggctgggtgcggtggctcacgcctgtaatcccaccactacggaaggctgaggtgggcggatcacttgaggtcaaaactttgaaaccagcttggccaacatggtgaaaccccacctctactaaaaatataaaaattagccgggtgtggtggtgtgcacctgtaatcccagctacttgggaggctgaggcacaagaatagcttgaactggagaggtggaggttgcggtgacccaagatcgcaccactgcactctagcctgggtgacagactaaggctccgtctataaataaaataaaataaaataaaaagctcacacctgtaatcccagcactgtgggaggctgagacgggaggatcacttgaggtcaggagttcgagatgcctgaccaacatgtcgaaatcccatccctaccaaaaacacaaaaaaattagccaggcatggtggcgcatgtctgtaatctcagtgattcaagagggtgaggcataagaattgcttgaacccaggaggcagaggttgcagtgagccaagatcacaccactgcactccaccctgggcaaaagagcaagactctgtctcaataataataataataataataataataataataataataataataataataccagctaggattattgctttgtgaccttccttgtgtgtttcatttgttgttgtgacagggtcttgctctgtcacttagactggagtgcagtggtataattaaagctcactgcagccttgatctcccaggctcaagggatcctcacacctcagtctctcaaatagctgggcccataggcacatgccatgaagctcagctaacctttattttatttttttgagatggagtctcactctgtcccctaggctggattgcaacggtgtgatcttgactcactgcaacctctgcctctcaggttcaagtgattcttgaagaagagaccctgactctttttttttttttttttttgagactgagtctcactccgttgcccaggctggagtgcagtggtgcaatctcagctcactcactgcaatctcttgcctcccgggtacaagcgattctcttgtctcagcctcccaagaagctgggattacatgtctgtgccaccacaccggggtaatttctacatttttggtagagatggggtttcaccaagttggccaggctggtcttgaactcctgacctcaagtgatccgcccacctcagcctcccaaagcgctgggattaaaagcgtgaaccactgtgcctaatgctcagctgacgttttaaaactttttgcaggccgggtgcggtggctcatgcctgtaatcccagcactttgggaggctgaggcgggtggatcacgaggtcaggaattcaagaccagcctggccaacatagtgaaaccctgtctctaccaaaaaaacacaaaaattagccgggtgtggtggcatgtgcctgtagtcttagctactcaggaggctgaggcaggagaattgcctgaaacctgggaggcggaggttgcagtgagctgagaccgtgccattgcctgggtgacagaatgacactccatctcaaaaacagaaaacaaaaaacaaaaaacaaaaaacactttttgcagagatgaggggtctcaatatgttgcccagagtgatctcaaactcctagactcaagcaatcctcctgcctcggcctctcaaaagtgctgggagtacaggaatgagccatagtgcccgcctgtaatcccagcactttgggaggctgaggtgggcagatcacctgaggtcacgagttggagatcagcctggccaacatggtgagaccccgtctctactaaaaatacaaaaattagctggccgtggtggcgggcgtctgtaatcccagctactcgagaggttgagacgagagaatcgcttgaacctgggaggcagagattgcagtgagctgagattgcaccactgcactccagcctgggcaacagagcaagactcagtctcaaaaaaaaataataaaaataaataaataaaagagtcagggtctcttattgctctgtccccaggctggagtgcagtggggtgatcacgataatggctcactgcagctttaacctcctgggctcaagccatcctccattctcagcctcccaagtggctagaactacaggcatgtaccatcacacccgactattttttttttaaattttattgtaggcctggtgcgatggctcacatctgtaatcccagcactttgggaggctgtgagcagaacacttgaggtcaggagttcgagaccagcctggccaacatggtgaaaccacatctctactaaaagtacaaaacttagctgggcatggtggcagacgcctgtagtaccagctactgggtaggctgaggcaggagaattgcttgaacccaggagacgaaggttggcagtgagcagagatcgtgccaatgcactcactccagcctgggtgacagagatagactccgtctcaaaaaataaataaataaataaataaacaaatatatatatatatatatagagagagagagagagagagagagagagagagagagagacagagagagggagagagagagaaaggagttcttttttttctttttttgagacagagtctcactatgtcacccaggctggagtacagtggcgcgatctcggctcactgcaagctccacctccagggttcacgccattctcctgtctcaggctccggagtagctgggactacaagtgcccgccaccatgcccagctaattttttgtatttttagtagagacgaggtttcaccacgttagcaaggatggtctcgatctcctgacttcatgatccgcctgcctcggcctcccaaagtgctgggattacaggcgtgagccactgcgcctggcaaggaggtgatctttctctgttgcccaggctggtctggaactcctggcttcaaggagcttttggcctcccaaagctctggcatgacaggtatgggccaccgtgcccggcctgtgaccttccttaaccctcacaccacactgtaacacagggatcacgttatgctacaattatgcccattgaacagatgagaaaatggaggctgaaagcgactacgcttctattttcctctcagccacagtcactaacactgtgtgcaaaaaatttctgactctccccctttggaccaaacaggtggatggcacttcctggcctccttgtgactgggcagataaatgattatttctggcaaataggttgtgagaggaagtggcacatgacatttctgggctgaggcatttaagtgctggagcctccagagatctatctttcccaggcagggtgatgagccacatttgatatggtggcgactctatgaggccgggccctgaatgactacggtgaatggtgccccctgctgagccgcaatggaagtgtagcaggaagaaaaagcaaatctttgctgaattcagccactaagacttttggggttgttttctacaccacatacattttttttctgtttctttcttgctttctttctttctttttttttttttttttgagacagagtcttgctctgtcacccaagcagcagtgcagtggtgcgatctcagctcactgcaacctccgcctcctgggttcaagcgattcacctgcctcaacctcccaagtagctgtgactacagaagactcctgacctcaagtgatccacccgcctcagcctcttgaagtgctgggattacaggcatgagccaccgcgcccggcccgcttctttatttctctctttctccattctcccctcccttcaaacaattttttttttctttttagtacttactgtattctgtgcaccattttagatactgtcttcaataaaaaaagcaagatccctgactagggccaccatgttcagttacacaagttgtgtactgtgcaaaattactagaccaaggtggcaagtaggactgaaattcggtctgtgcactgcctgccaagctatatttcttggtgtggtgtctgccaggaggaagagatgcctttctttttttcttttttttctttctttctttttttttttttgagacagagtctgttctgtgttgcccaggctggagtgcagtggtgcaatcttggctcactgcaagctccgcctcccaggttccagcaattctcctgcctcagcctcccaggtagctgggactacaggtgcacgccaccatgcccggctaattttttttgtgtttttagtagagacggagtttcactacgttggccaggctggtctcgaactcctgacctcgtgattcgctcgcctcagcctcccaaagtgctgggattacaggcatgagtcactgcacccggccgaagagatgtctttctaattcactcacagatgctatataggctagctggggctctgcacatgacctccagaagtggacagtccggaagaggaaatgcacagggagcagggaaatgtgtaaatgtctaatataaattttttcctttattttcctttttttttttgacagagtcttgctgtgttgccaaggctgaggtgcagtggtgcaatcagagctcactgcacccttgccctcctgggctcaagtgatcctcccgccccagcctcttgagtagctgggaccacaggtgcttgccaccatgccctgctaatttttttatttttattttttagagacagggtcttgctatgttgtcccggctggtctcaaactcctgggctcaagtaatcctcctgccatggactcctaacgagctgggattataggcatgagccactgtgcccagcctcatataatttttaatagtgatatggagacaaagcaagacaagttctatagacaagatcagtgagggcgtctctgagcacgtgaagctgaacttgagacctgaaccacaggaggaagcattcatgcaatgatttggggcaagaacgtcccaagtagagagaacagccagtagaaaggccctgagctggggctgggcatggtggctcaagcctgtaatcccagcactttgggaggttgaggttgacggatcacatgaggtcagcagtttgagaccagcctggcctacatggcaaaaccccatctctactaaaaatacaatacacaggtgggcgtggtggtgcacacctgtgatcccagctactcgggaagctgaggtgggagaatcacttgaatgcaggaggcggaggttgcagtgagccgagatcacaccactgcactccagcctgggtgacaaaccgagactccatctcaaaaaaacaaagaaaagccctagccaggcgcggtggctcatgcctgtaatcccagcactttggaaggccaaggcaggcggatcatgaggtcaggagtttgaggccagcctgaccaacatggtgaaaccccgtctctactaaaaatacaaaaattagccaggtatggtggtgcatgcaaacctcatctctactaaaaacacaaaaattagctgggcgtagtggtgcatgcttgtaatcccagctactcctgaggctgaggttgcagtgagctgagatcacgccattgcactccagcctgggcgacagagcgagactcggtctaaacaaaaaaaaaaaaaagaaagaaaagccaagccctgaactgggcatgcaattggcatgtttgaggaacagtgaggaggcctggggggttggaacagtgagtgaaggggggatagtgagaacatgagggcagggaggtaacaggttgctatgttttcctgattttttttttttaatggggtctcactctgtcgtccaggctgcagtggagtgatgtgatcacagctcactacagcctcaaattcctgggctcaagcaatcctcctgtctcaacctcctgaatagctgagactacaggtgttcacagccatgcccagctaatttttattttttgtagagacgggtctcactacgttgcccagattggtcctgaactcctgggctcaagcaatcctcccgccttggccttccaaagtgctgggattataggcatgagctaccacacccagcctgctatggtttggataaggtttgccccattgaaactcatgctcgaacaatcgattggctaacgaggtcgatgacgccaggcacaagatgctgggcctaccgcggtagcgtgagggaagccgtgcgttctgttccaaggcatctgtgagcccatggagtatacaccatgagcaaagctcaccctcctgagttgaaaaaatttacggacaagaagttttcattgaaattaaatggtggcagacatgtccaaggaatattgcggggatttgatccctttatgaaccttgtgatagatgaatgtgtggagatggcgactagtggacaacagaaaaatattggaatggtggaaatacgaggaaatagtatcatcatgttagaagccttggaatgagtataaataatggctgttcagcagagaaacccatgtcctctctccatagggcctgttttactatgatgtaaaaattaggtcatgtacattttcatattagactttttgttaaataaacttttgtaatagtcaaaaatgttttttcagatgttctgaatatacaatattagctctcattccaattttttctaacatgaattttcctggttgacattgatttcaaagggttttatgtattaaagtgacagaatcttattaaatgtgaaacatggcaaggagaaaaaaaaaaaaaaagaaactcatgctaaaatttgatccccaaagtggtggtgcggtgttgggaggtggggcctagtgggaggtgtctgtgttatggggccagatctctcctgaatggcttgaagtagctctggaagcaatgagtgcttgctctcaagagcccggattagttctccagaacttacagtagttggccaggtgcagtggctcacacctgtaatccctgcactttgggaggccgaggcgggcggatcacgaggtcagcagttcaagaccagcctggccaacatggtgaaaccccgtctctactaaaattacaaaaaattaggccaggcacggtggtgggcacctgtaatcccagctactggggaggctgaggcaggagaattgcttgaacctgggaggtggaggttgcggtgaatcaagaccgtgccattgcactccagcctgggcaacagagagagactcagtctcaaaaagaaaaaaaagaaaatacattagttaggccaggaacggtggttcacgcctgtaatcccagcactttgggaggcagaggcaggcggatcacctgaggtcgagagttcgagactggcctgaccaacatggagaaaccccatctctactaaaaatacaaaattagctgggtgtagtggcacatgcctgtaatcccagctactagggaggctgaggcaggagaatcgcttgaacctgggaggcagaggttgaggtgagctgagacagtgccattgcactccagcctgggcaataagagcgaaattctgtctcaaaaagaaaaaaaaggccaggtgtggtggctcacgcctgtaatcccagcactttgggagtccaaggcgggtggatcacgaggtcaggagatcgagaccatcctggctaacacagtgaaaccccgtctctactaaaaatacaaaaaaaattagctgggcgtggtggcacacacctgtagtcccagctactcgggaggctgaggcaggagaatggcgtgaactcgggaggcggagcttgcagtgagccgagatcatgccactgcactctagcctgggtgacagagcgagactccatctcaaaaaaaaaaaaaaagaaagaaagaaagaaagaaaatacattagttaggccgggtgcagggacggtggctcccgcctgtaatcccaacactttgggaggccgaggcgggtggatcacctgaggtcaggagtttgagaccagcctggccaacatggtgtgagccaaagaaggctggtgtgagccactgcgctcagcctatattttcttatgtaaaagggacttcctggtgcctcctatccaatggtctcttccagggggccatgctggattcagcttggccgcatccaatcttttttttttttgagatgaactctcactctgtcacccaggctggagtgcaatggcgcgatctcggctcactgcaacctccacctcccaggttcaagcgattctcctgcctcagcctcctgagtagctgggattacaggtgcgtgccaccacacctggctaatttttgtatttttagtagagatggggtttctccatgttgaccaggctggtctggaactcctgacctcaggtgattcgcccaccttggcctcccagagtgctgggattagaggtgtgagccactgcacccagcctgcacctagtctcatgtatccatttgttcatgcatccattcgtctgtcccctaacacaccctctcatctcacctggtccatctccatgatcacttacctaaactagtgtggttgcctcctgtgggtttcccagcttccaccctcaccccctacgacttcttgtccagacagcagccagaatggtcctgtaaaacataagtcatgtcgcatttgtctctgctctgacccctccccgggctctgacctcgctggaaagaaaaatcagtgtcggccgggtgtggtggctctcgcctgtaatcctaacactccgggaggccgaggtgggcatgagccaccacgcccagccatatattttcaaaattagccaggcgtggtggcgggcgcctgcagtcccagctactcggaaggctgaggcaggagaatggcatgaacccgggaggtggagtttgcagtgagccaagatcgtgccactgcactccagcctgggtgacagagtgaggctccatctcaaaaaaaagaaaaaagaaaagacccctcatcatccctccaattccgccagctctacgcactgggaggcaggaaactaaaaacatgaatctggaacctggcttcatctcttaatagctgtgtgactttgggcaagggtcttaacctctctgagctccaaggaaatcatgcatgtgcttggaacagtcctggcacacaataagggttgcataaatattggtgacaattactgctactgccatcttttgtttttttttttgagacggagtctcgctctgttgcccaggctggagtgcagtggcacgatctcagctcactgcaagctctgcttcccgggttcacgccattctcctgcctcagcctcccgagtagctgggactacaggtgcccgccaccatgcccagctaattgtttgtatttttagtagagacgctgtttcatcatgttagccaggatggtctcgatcccctgacctcgtgatccacctgcctcggcctcccaaagtgctgggattataggcgtgagccactgcacccggccttgctactgccatctgtaccaagattcaagcttcctccttttcccaagatccctacatcctgaccaccaattcccagcctccttactctctctctctgcccaccccactgccctggttcatgccagcttccgtgtccccacccgtgaggaggcattaacagcagtgaggaaagtgagtgagtaatgaatctgcctgccacggccataagaggcttcgtggcctgggttcaaatcccacccctgccacttaccagctgtgtggctggggggcaagtcacttcacatcacagggcctcagtttcttcatctgaaaaatgggtggaattcctgtcactctcaaggtggttgtggaaatccaaagagattacccacgtatcccatctacactctgcctcagactccatttaaggacgctgttgtcattactatgggtgtctcctcctctgccctgccctgcccaggaatatcccaaccctctctgcctgccaatacctactccaggcccactcctccatgaagcctcccaggcttgccccagcatgctggaactgcccctgtggtacagatggctcaggcccatgaacttaattgcatgctgccctggcagaactcttgtcttccagcttcaggctgtcatttaacttcatgtctctattttaaaacgtaaaccagatggcatcactgccctgcctgaaactttacaacagtttcccaccttctggaagaaaaactgcaatctccttactgtgacccacaaacccctgcagaatcgctgctctgggttcatcttctgctccaaccatgtgattccaaacttggtccagcctaaagaccttggccttgcccatctctctctcttttttttttttcgagatggagtcttgctctgtcacccaggttggagtgcagtggcgccatctcagctcactgcaacctccacctcctgggttcaaacgattcttctgccctagcctcctgagtagctgggattacaggcacgcaccaccacatccggctaatttttgtatttttattttgtatttgtttatttttatttatttatttatttttgagacggagtttcattcttgttgcccaggttggagtgcaatggcgcgatcttggctcaccgcaacctctgcctaccgggttcaagcgattctctcctgcctcagcctcccatgtagctgtgattacaggcatgtgccaccacgcccagcttattttatatttttagtagagacagggtttctccatgttggtcaggctggtcttgaactcctgacctcaggtgatctgcctgcctcggcctcccaaagtgctgggattacaggcataagccaccacgcctggcctatttttatttttttttgagatggagtctcgctctgtagcccaggctggagtgcagtggcacgatctcagctcactgcaacctccgcctcccgggttcaagcgattctcctgcctcagcctcctgagtagctgggcttacaggcgtgcgccaccacacccagctaattttcatatttttaggagagagggggtttcaccatgttgatcaggctggtctcaaactcctgacctcttgacccacctgtctcagcctcccaaagtgctgggattacaggggtgagccatgcccctagccaatttttgtatttttagtagagacagggtttccccatgttggccaggctggtctcaaactcctgacctcaagcaacccacccgcctcggcctcccaaagtgctgggattacaggcgtgagccaccgcgcccgggcccccttgcctgatctttgctgggctggcaccccttgcccacaactactctctacagtaccacccgctcatattttattcatagcagttagtgccatctgaaattatcttctttatttacttgctaacttgtttgttggctgcttccttcctttcagagtgccaactcctcaaaagtagggattttgttttgttcactgttgcattttctgtgccaagaacagtgcctagcacatgcacgtagcaggtgctcactaaatatttgtagactgagtgaatgaatgtgtctcaggtcctcgttctgattgctctctgtgctccccatccttgaaacagccccctaaacatgcctgctgtgcggttgccaactgtcctaggctccccactttccctggctcccctcacacctgaacacagagatgaagagccacttcagcccggatattgagtgtttgggctggaatttcagcatcctcaccccctcatcctgggaagggcctgaaacttagcaaccccacggccacacagaagcagtgtggccagcaggaggaggggaagggggttcctgggagcacacagaagctaggggaagggggaaaccacgcccaggctccccgttccagcacagtgttgctttggagagaaggagggaaagaggcctctgattcactcttgaaaaaccggctcctgggtgtttccggggagaacgcctacttcccagcctcggcccaggttgccaggggggaacccagtgggcccagaccccagcatcctggccccctgcagacgccactctcttctctggacccaggtagttagacctgccctctccagctctggggagaagggaaaggagggcagcttcctgtttgagtggctggtaaagcaaaagaccagcaggtgtggccctgatgatgagtacggggtagggggtgggaggggtagggggccggagctactcagcaacaactgagccgtggagttattggtatccagtctagtgggtgtgactccagttctggaccctggggcatgagttccagtcccagatgtgccagttactagctgtgtgaccttgggcaagtcactccacctctctgggtaggctgcctcaccttttttacaagaaggcacagcacctcccatgaggtgtttagagtcaattatcctcatggtaaatgcctgacacggaagctctccaataaatgctagctgaggtggagtttttcatgacgattattattcagaccgtggtcctcactgcgtcccccccaaggccctggagggttcagacgcggttagctcaggggaagtgcccaggaaagggtcagaaacactgaccccgcgcctgtccacgctgggatggggacagtccagccgggggacggggggaggggcaagcccagaaaccccagcccagcgttgggaggcgtttgtcccctgcccgccagcaggaagggagctgcccccaccaccccccacccccgcttcccctgggaaggggcctccggcatccccgcgcgcagcctagacctccagtcgcgtccacggcgccggccccaccctgcaggatcggccggatcctcgcaggcccgcgacccccgaggcccccggagcagacacatccttctcgcagaggccactcacctgctccgccgccgccgccgccgccgccgccgccgccgctgcctccgcctccccgtgcgcacccggctcggccctccgcaaactccagaccgggcctctcccgcagcggcgcctggggggcggggccgacgcccgcggccggccaatcagcggctgcctctcggtgctcgcagccaatccgcgtcttccgcttcgggtggacccgacggaaacattccagagggatccctccgcctcgcccggctcttcccgactcctcccctcgccgcgaagcagtggaccgttccgccccgcctaagccgcggctggctgtaccaccggagggctgaggaggggggggagctgcagctgggccccggccaatcgcgagggaggaaggagacaagcggccaatgggaaggaagctggggcccctgaaccacgtgctgtcggctgagtgtcagtctcgggtgccctgggtggtgaggggcgggggagtcaggtgacctaggccaggtttcggggaaaggattcgaacttccgacgtccaggaaagcggacagtttaggagacctgggtgggggtcaatggcagtccccaacccagttccctgcccggcctcctctgccccagcctggccatcctcggagcggataaaaagatgcattcaatctctgggggcgggcgggggatcgagatgaatagggagggtcccgagtttccctgcttcctgggctgtacaatggacaaaggcattcattcattcattcgttcactcactcatcaaatatttaatgtgccagactgctccgtgccagactctgtcctacctctgaagacgcgtcagtgaataagctgaatgtgctcctggtagaggtaacagagcgtgcaaaagccggacagagagatacagcacgctttaggatactgcaatatcgtgggagctagtaaatcagtgtggaaaggcaagatgcaatgaaagacaagggtgagatagtttatctgcttgttggtttgtttatgtgctaggtcacagaaggtacccagccagcctttcatagatctgtctcctccatctgactgtgagggtggaggctgagtctctcttgtcaacccctcactcccacctcaggctgccacacggcaggttctcagcaaacctgtgtggacaaatagaccatgtagtttataaggaagggggatttatcaggtggacacagatccaagaaacaagagtcacaaatgcacctggaccaggccaggacgctcagttcccgggacaagtgagatttccttgttctagttcaaacccagccacttggacagcaactggggctgaatgctgtgtgttctgggaactgtagttcctggaagcctctaagtgctgagaccctgctcaagctccatagaaagactggttctttgcagttcccagggtgagatgttgtgcatatcagtcccaccaggacctgcagaggggcaaactaaaatgggagatggaaccttgagctttgctgctgaggattgcctagccagccccacccagctggcaaacaccgagattgctgtggcaggccaggcaacaggcacagctattgtccgtcccttcctgttctgctgacctctgccatcccactgagcaatcagttgcctgggctggccagtaccctctgtgggactgtgctgcctgccctgcttgagcctggcatctaagctgccccctgcacacttggagaggacgggatgctgagcccaggggacagcatgactgaggctgcagagtcctgagccagactccaactggctcctgtttcctgatgaggaagtgcccggagaaggggtgatgggattgtgggattgctcaagacacagagcagcactgggcacctcctttctgaatttttttttttttttttttgagacagtgtctagctccgttggccaggctggaatgcagtggcaggatctcagctcactgcaacctccacctcctaggctcaagtaatcctcccatcttagcctaccgagtagctgggaccacaggcatgtaccaccacacctggctaatttttgttgttgttgttgtttgtttgtttgtttttttgagacggagcctcactctgtcacccaggctgcagtgcagtggtgcaatctcagcttactgcaacctccgcttctcaggttcgagcaattctcacgcctcagtctcctgagtagctgggattacagcgtgcgccatcatgctcggctaaattttttgtatttttaaaagagacggggtttcgccatgttggccaggctggtctcgaactcctggcctcaagtgatccacctgcctcgtcctcctgaaatgctgggattacaggcatgagccactgcacgcagtctattcctttgtttgtctgtttgtttgttttgagacagagttccactcttgttgcccaggctggagtgcaatggcgcaatctcggctcactgcaacctccacctcccaggttcaagcgattctcctgcctcaacctcctgattagctgggattacaggcacccgccaccacatctggctagttttgtatttttagtagagacagggtttcatcctgttggccaggccggtctcgaactcctggcctcaagtgatccaactgcctcatcctctcaaaatgctgggattacaggcatgagtcactgtgccaggcccatttgtttgttttttgatagagacagggtctcaccatgttgcacagagctggtcttgaactcctgggctcaagccatcctccctctttggcctcccaaaagtgctgggattacaggtgtgagccaccatgcccagccctccttcccgattttatagctcaagaggaatgcctaaaagctgaggctgggaagtccaatggtgagcagcttagatgtgagcgctacctctgttcctttaaaagaaaaaagaggccgggtgcaatggctcacgcctgtaatcccaacacattgggagggtgaggcgggcggatcacaaggtcaggagttcgagaccagcctggccaacatggtgaaacctcgtctctactaaaaatacaaaaattagctgggtgtgatggtgggcgcctgtagtcccagctactcaggaggctgaggcaggagaatggtgtgaacccgggaggcggagctggcagtgagccgagattgcgccactgccctccagcctgggcaacagaacgagactccgtctcaaaaaaaaaaaaaaaaaaagaaaaagaaaaaacagaaaaaagaaaaaaattccatccttgaatgccagctaacacatgcagaagggaaggttgtgtgcgttagaacatcattgttttgctgagtgcagtggctgcagcctctaatcccagtgacttggaggctgaggctgaaaggatcccttgagggcaggagttcgagactagccgaggcaacatagcaagacctccatctctacaaaaatgggtgtggtgctgtgtgcctgtagtcccagctactcgggaggctgaggcaggaggatcacttgagcccaggagtcgaggctacagtgagctatgagctacagcttcctatgtgccaggcatcattccaagaacttcctatttattaaaccatgtaactctcctgatgacctaggtgcagttttacacattgtatatttgtcctcccactctgtcaggggaaaatttgcttcacccatgatatccttcattggagggaaattcttaattttgatataatagaactcactgtgaagttatattaagaatgcttggctgggcacactagctcatgcctgtaatcccagcactttgggaggctgaggcaggtggattgcttgacaccaggagttcaagaccagcctgggtaacataatgagaccctgtctctacaaaaaataataaaaattagccagaaaaggaggcactggactatagtcccagctactcaggaggctgaggtgggaggatcacttgagcccaggagttcaagcctacagtaagctatgatcacaccactgcattctagcctgggtgactgagcaagaccctatctcccaaaacaaaacaaaagaaggccttttcatccctatatggcaaacttatacttccacattttctttattttttttttgaaacagagtctcactctgtcacccatgctggagtgcagtgatgtgatctcaactcactgcaacctccacctcgcaggctcaagcgattctcacgcctcagcctcccgagtagctgggattagaggcatgtgtcaccatgcctagctaattttttgtattttttagtgaagaccgggtttcaccatgttgtccagactggttttgaactcctggcctcaagtaatccgcacgctttggcctcccagagtgctgggattgcaggcatgagtgagccaccgcacctgactcttccacagtttccttttttttttttttttttgagacggagtctcgctctgtctcccaggctggagtgcagtggcacgatcttggctcactgcaagctctgcctcccaggttcatgccattctcctgcctcagcctcccgagtagctgggactagaggcgcccgccaccatgtatggctaattttttgtatttttagtagagacggggcttcaccgtgttagccaggatggtcttgatctcctgacctcgtgatctgcccactttggcctcccaaagtgctgggattacaggcgtgagtcactgcgcctggccccattttcatttcttcattctacgttttttggttttgttattttatttatttatttatttatttattttgagacagaatcttgctctgtcgcccaggctggagtgcagtggcgtgatcacggctcacggcaacctctgcctcctgagctcaagcaattctcctgccccagcctcccgagtagctgggattacaggctatgccaccacgcctggctaatatttttgtatttttagtacagacagggtttcaccatattggccaggctggtttcgaactcctgacctcatgatctgcccaccttggcctcccaaagtgctgggattataggcatgagccactgtgcccggcccattctatggtgttacttttcctgagtctttattccatccgtagtccacctgaggttgtggggtagaatggtcttctttttctccataacctgtgctgttcagcagctctgtgaccttgtgtgaagcccatcctcttctgtgcctcggtctcctcatttgtaaaatggagataataataatacacaccagccgggcgtggtggctcacacctgtaattctaccactttgggaggccgagacaggtggatcacttgaggccaggagttcaagaccagcctgaccaacatggagaaaccctgtctccactaaaaatgccaaaaatcagccgggtatggtggtgtgcacctgtaatcccagctactcaggaggcgcaagaatcgcttgaacctgggaggtggaggttgcagtgaaccgagattactccactgcactacagcctgggtgacaaagtgagacctcatctcaaaaaaaaaggccgagtgtggcggctcatgcctgcaatcccagtactttgggaggccaaggtgagtggatcacctgaggtcaggactttgggaccggcctggccaacatggcaaaactctgtctctagtaaaaatacaggccaggcgtggtggctcacacctataatcccagcactttgggaggccgaggcgggtggatcacgaggtcaggagatcgagaccatcctggccaacatggtgaaaccctgtctctaccaaacataaaaaaattagccgggtgtggtagcaggcgcctgtagtcccagcttaggagtctgagacaggagaatggcgtgaacccgggaggtggagcttgcagtgaggcgagagcctgccactgcactccagcctaggtgacagagcaagactccgtctaaaaatatatatataatatatatatatataaattcgctgggcatggtggcgtgcacctgtaatgccagctattctggaagctgaggcaggagagtcacttgattctcgggaggcagaggtcgcagttagcttgattccggaggcggaggttgcagtgagctgagaacatcccactgcactccagcctgggagacagagcgggactccgtctccaaaaaaaacaaaataaaataaataatagtacacacctccttaggtggttatcagcatgttaggattaaatgggctattccatgtcaaatgccccgatggtgccaggcagatagtaagcacttactgcataccagctgccattactaaaatgtgctgagggcacaatcatagatagacgcaatatgtcataatggacacaccatagaaatagaaacctgtattggatcctcgctgtgtgtcaggctctgtgctggtcgcttttcatgtctaatttcactggatcatgttgagctcctggggatgggactgatagcacccccactctacagaggaggagactgaggctcagagaggggagacatgagctgaaagatgcacagtaactcatcgatgtggaatcttagctccaaccccaggacatgagacgtccctcaagggagtgagttctactttcttcaactttggggacagggcggactgagatgtgggggacaggagggacagcaccaagggacatagccccagccaggtgatcctggaggcagggctgagtcctgtggcctcaggttacagccccagcactgtcacctgcctttttggtttgtttgtttgtttttaattgagacagaagtcttgctctgtctcccaggctggaatgcagtggcgcaatcttggctcactgcaacctctgcctcccggaggttcaagcaattctcccgcctcaggctcctgagtagatgggattacaggcacccaaaaccatgcctgactaatttttgtatttttagtaaagacagggttttgccatgtgggtcttgaacccctgacctcaggtgatccacctgcctcagtctcccaaagtgctgggattacaggcgtgaaccactgcgcccggcctgacacctgcctttgactgctgggttttaggaagtgacacccagcagctctgcaggtcacactgttttctagaggggtctttgcagaagcaaagagaaacaaatggcaacagtggtgatgataaacaccacaccagcccttctccctgaactcctgaggtatttctctgtcttgctttctctataaggacatctcagggcatctcaaactgaacccatctggaattgaggtcttgattgacaccccaaatgtgccatttaccctgtcttcccctgcatggtgatagcaattctttcagttgatcaggccccaaaccttggaataagacttaaatactacctaccttccttcctctctctccttcctttttttctctctttctctccttccttccttccttcgttccttccttccttctcttctcttctcctttcctttttttcttacttcctttccttcttccttcccctccctccctcccttcctccctttccctcttccttcctttcttttccctctcctctcctcttcttttctttcttgacagagtcttgctttgttactcaggctggaatacactggcaaaatcatgactccctgcaacctcaacatcctgggctcaagcaatcctcctacctcagcccctcaagtacctgggaccacaggtacgggccactacactcagctaatttttaattttttgtagagatgggattttaccatgttgccaaggctggtttcaaactactgagctcaaatgatcctcctgccttggcctcccaaagtgctgggattacaggcataagccactgccccagccgactcctacctttctctcatagtccagctctgtcagcagcacgtcctatcagcactactttcttttctgttcttttcctttttttaaatcccaatgggcaagcaatgacagtgaaactcacagacacatcagatatttttaaaaagcttttcttataggcacaatattttcttttcttctctctctttttttttttttgagacagggtcacgctctgtcatccgggctgaagtgcagtggtgccatcatagctcaccgtagccttgacctcctaggctcgagtgggtgtcctaccacacccagctaattttggtatttttcatagagatggggttttgccatgttgcccaggctgattttgaagtcctgggctcaacctcctgcttcagcctcctcccaagtagctgagattacaggagggagccacctatctcatctctggcccaagatatacatacatacatacatacatacatacatacatacatacatacatatatttaaagacaaagtctggctatgtcgctcaggctggagtggagtgcagtggcacgatctcagctcaccgcaaacttggcctcccagtttcaaatgattctcagcctcagcctcccaagtagctgggattacgggtgcataccaccaggccccgctgatttttttttctttttttttttttgcagttgcaagatttaatagagagaaaacaaagctcccattcaaagggaggggacccaaagggggtagccattgctggcttgaatgcctggatttatatcccgatcattgtccctcccgctgtgctctcaggtgatagatgattggctatttctttacctcctgtttttgcctaattagcattttagtgagctctctgattggttgggtgatttttgtatttttagtagagatgatgttttatcgtattggccaggctggtcttaaacgcctcacctcaagtgatccgccctcctcagccccccaaagtgctgcaattataggtgtgagccaccgtgcccggccccaagatgtattcttgggtgggtgtggtggtgcgtgcctgtggtcccagctacttgggaggctgaggtaagaggatgacttgagtccaggaggtcgaggctgcagtgagctatgatcgcaccatttcactccaggctgggcaatagaatgagaccctgtctctaataaacaaaacaaaacaaagccaaaaaaaaaaaaaaatcagccaggtgcggtggctcatgcctgtaatcccagcactttgggaggccaaggtgggtggatcgcctgaggtcaggagattgagaccagcatggccaacatagtgaaaccccacctctcttaaaaatacaaaaattagctgggcgtggtgggacatgcctgtactcccagatactcgggagactgaggcaggagaatcacgtgaacccccgagaccgaggttgcagcaagccgatattgcgccgctgcactccagcctgggcgacagagcgagactctgtctcaagacaaaaaaaaaaaaaaaaaaaaaaaaatcctgggctactttcgccccacctgctccgacctctcccggtccagccagccccatcacctcctgcctggtggtgcggtgaatggcttcggtcctggtccacccgctctgcccttacccctacggtcagttctccgcacagaggccagggggcgcccgtgagcacccaaatcaggtcacctcctttctctacggaggacctccccccaggaggccatgagcccccaaagaacctgcccctgtgagccaaagtgttttttattttcaggtgtcacgcctggctacattgatgtccagcataatattcctggggaacgttggggccccatgaaggcaaacaacccaggtcccagctctgtcttcctggtaaaagcaaatcaggccttgtccctcctaactctcaatttctcttccaactcaggaatgcagggcctggcctgtctcattcctagacacgccctgccctgctctctcctgttctctcgattccagtcacaccaggcctgtgtgtgtgtgtgtgtgtgtgtgtggatggccctgtgggggagtggttcccagatctccagcctaggggcctcttccccgggccttggctccaggagcccctccctgcgccctaacaagctcctgtcccttggcctgtgtgtccagggcctgccaggcgtcttcccctccacgctgcgggctatgggaagtggctcggtcagtttaatgagttgaatgatgccccaccctaaaatatatgtccacattccagaactgtgaatgtgacttgacttggagtaagtgtcttcaaagatgtaattcagtggaggatctcgagatgagatcatcctggattagggtggctggccccgaaatccaatgatgggtgtccttataagagatggaaaaggagaagacacaaagacacacagaggggagggccacgggacggcagcggcagagattggagcgatgcagctacaagcccaaggaggctaaggattgctgaaaccaccagaagccaggagaaagccgtcctcacttgttaatgccaggtacaggggctcatgcttgtaatcccagcactttgggaagccaacgcaggagaattgcttgagcccaggagtttgaggccagcttgggcaacacagtgagaccctgtctctacaaaaaatttaaaaattacgctggcatgatggtgcatgcctgtggtctcagctacttgggaggctgagataggaggatcgcttgagcccaagagatcgaggctacagtaagccctgattgtgccattgcactccagcctgggcaacagagtgagatcctgtctcaaaacaaacaagcaagctgggtgcagtggctcatgcctgtcatcccagcactttgggaggccgaggcgggcagatcacctgaggtcaggagttcgacaccagcctggctaatatggtgaaaccctatccctactaaaaatacaaaatattagctgggcgtggtgatgtgtgcctgtaatcccagctacttgggaggctgaagcaggagaatcacttgaacctggcaggcgggtgctgcagtgagctgagatcgcgccactgcactccagcctgggcgacagagtgagactctgtctcaacaccaccaccaccaacaacaaattacttgtcgtttgaagccacccagtttgttgtggcagccctaggaaacggaaacccacaggtgtgtttcctaggagactgtgagtttcacgagctccatcctccctcccctatgccagatggccaagttttctgcttggcgcatctcctgagcctagcactgaggtgtccctcaggaactgtgcccatagactagtctacagattgtgaagtagaaacaggtcccccatgccaggcgcggtggctcacgcctgtaatcccagcactttgggaggccgaggtaaggcagatcacctgaggtcgggagttcgagaccagcctggccaacatggtgaaaccacgttgctactaaaattacaaaaattagctgggcgtgatggtgggtgccggtagtcgcagctactcaagaggctgaggcatgagaattgcttgaatctgggaggtaggtgttgcagtgagctgagatcatgccactgcaccccagcctggatgacagagcaagtatcggtctcaaaaaaaaaaaaaaaaacaaaaagaaaagaaaaagaaaaaaagaaacaggtccctcaggaaagaggggctctcccggactgaatatctgcttctccctggtgggaaagctgaaggaattggggtatgggggtggggtccctggcaagggtggtggggactactagctgacccgagggctgggttatccttcctctgcacataccatgacatgaactatcgtaggaaaaatgttgcaggtcctcttgtctgaattactttgtcacttaattactcacttaacaaacactcaaagggtcagttccggggcaagcatcactctggcaactggtgatacagattattaggatgtagttggtgacctcaagggaactcacagttgccacaaagcgggggacattttttagtattctcctgccgttgtctctcctgccccactgacaaagagggaaggtgtctcaactaataatcagggagtttgagaaatcagcctctgcttccccttgggcaagtgtgatgtcaacagactatgaaagtactttcagccaggaggggtggctcacgcctgtaatcctagcactttgtgaggctgaggcgggtggattgcctgagctcaagagttcgagaccagcctgggtaacatggtgaaaccctgtctctactaaaatataaaaaattagctgggcgtggcagcatgcacctgtaatcccagctacccaggaggctgaggcaggagaatcgcttgaacctcgggggcagaggttgcagtgagccaagattgcgccactgcactccatcctaggtgacagagtgagactccttctcaaaaaaaaaaaaaaaaagaaagaaagtgctctcaggtctgtgggagagaagatgagtgcatgctctttaaggcctagtttttttgttttttttttttgagacagtgtcttactctgtcgcccaggctggagtgcagtggcgagatttcgacctcaggtgatccacccagctgagccttccaaagttctaggattacaggcgcaagccaccgtacccagccaaggcctagattttaatagagaatatagatagatgcttcttgtttgtgttgtgccatttttaggtgttttttttttctttctttctttctttctttttttttgacagagtgttgctctgtcaccgaggctggagtgcagtggcacaatcttggctcagtgcaacctccaccttctaggtccaagcgattctcctgcttcaccctccagagtaattgggattacaggcacctgccaccacgcctggctaatttttgtatttttagtagagacagggtttcaacatgttgtccaggctggtctcgaactgctgacctcaggtgatccacccacctcggcctcccaaagtgctgggattacaggcgtgagccactgcgcctggcccatttttagtatttagtggaagtttggtgcattgagatttcctttattctttcctttttttttttttttgagacagagtttcactctgtcaccaaggctggagtgcagtggggcaatctcagctcactgcaacctctgtctcctgggttcaagcaattctcctgcctcagccactggagtagctggggttacaggtgcctgccaccatgcccagcgaatttttgtaattttagtagagacggggtttcactgtgctggccaggctggtctgaaactcctgacctcaggtgagccatccgccttggcctcccaaagtgctgggattacaggcatgagccactgtgcccggcccagcttgacttttagatataatgtttcagtttttagtagagatggggtttcaccacattggccaggctggtctcgaactcctgacctcaaatgatccacccatggtggtctcccatagtgctgggattacaggcatgacctgctccgcctggcctggggcaggttttctgccaagtgctttagatatatttgctaatgttattcacacttgctctattcctggcctggataaagcgcttctcagggattagctgtctgagttctagctccagaagagtgagaaaggaggggctgcgatgtttgattagtcctgttatacatgggaagaaactgaggctctgaaaggttttgtcatttgtttgaggaaatgtggtgagcagaacttggacttggcacccccctaccccagaagctgggttcttcatcgctatgttcttttgtttcctaaatgcactaactcacccagatgtcacagcatctctatgagagctgcacttctgtttcccgtttcttctgtttttttttttcgagacagagtcttgctctgtcacccaggctggtgtgcagtggtgggatctgggcttactgcagcctctacctcccagtttcaagcgattctcctgcctcagcctcctgagtagctgggattacaggcacctgccaccacgcccagctttgtatttttagtagagacagagtttcaccacgttggccaggctggtcttgaactcttgacctcaagtgatccatccgcctcggcctcccaaagagctgggattacaagcatgagccaccacacctggctaatgctcagctaacgttttaggagggtggatcacctgaggtcaggagttcgagaccagcctgaccaacacggtgaaaccccatctctactaaaaatacaaaaattagctgggtgtggtggcgggtgcctgtaatcccaactactcggaaggctgaggcaggataattgtttgaacttgggaggcggaggttgcagtgagctgagattgcatcattgtactccagcctgggtgacagggcaagactccgtgtcaaaaaaaaaaaaaaaaaaaagaaagaaaagaaaagaaaagaaaagaaaaaaaacaaaagcaagcaatcaaactgggactcaaatccggaagcaagaacgatgtgagaggagtcaggggtcgccaaacactaatttagatcttcacacccagctgggtggacctgccagaataaaggtggggaatagcacaggaatgaggaagctctttatgttcacagcatcttgtgtgagaaaaaaaaaaaaaaaaagcggagtgtacagtatgtactccttgtgtaaaaaaagaaaaatgtattccccgcagcatctcaggaaaggcgcaggagagacggggaacattcgtatccagttcgggggtgtggaatcggatggtagggtgggagggaggactttcactctctgtatcctttccagtgttgtattgtgattacacagtcaaaaaataaaactgaaaatttagaaattgtgtttatgcttatgtaagcacagactcatctcttggaggaagcacaaaaatggtttttttaaaaaaggaaaaaaaggccgggtgcagtgactcacgcctgtcatcccagcactttgggaggctgaggtgggcggatcacttgaggtcaggagtttgagactagcctgggccaacatgatgaaatcctgtctccactaaaaatacaaaaattagccgggcgtggtggtacgcgcctgtaatcccagctactagggaagctgagccaggagggtcgtttgagcctgggaggcagaggttgcagtgagccgagattgcaccactgcactccagccttggcgacagaccgagactctgtctcaaaaatgagaaaaggaaaaaaaaaaaaaaaaatctgtgatgccaatgccagtgtctatagtggtgcagtaggatggggaacttcagggccaggggaaggatgggaggactcggcttttcaccataggccaaatggacctattgagtgctgttctatgattataaaaaaaaaacactgctggtattgtaatgcaggtgggtcaaagaatgagtcagttgcacacgtcctgtcatggaaggagctctgagacctgatcagagatgcagcatggaaaagtgaaataaatccattaaagaaagcccaaggctgagcctataatcccagagctttgggaggccaaggtgggagaatcgcttggggccagagcaacatatcaagatatcaagatatcggccagcgcaggttcacgcctgtcatcccagcactttgggaggccgaggcaggtggatcacttgaggtcaggagttcaagaccagcctggccaacatggtgaaacccagtctctactaaaaataaaaaattaaccaggcatggtagcacacgcctgtaatcccagttactcgggaggctgaggcaggagaatcgcttgaacccaggaggcagaggttgcagtgagccgagattgcgccactgcactccagcatgggcaaaagagcaagattccgtctcaggaaaaaaaattaaaaaaaaaaaaaaaaaaaaaggaaggtagaagtggctcacgcctgtaatcccagcactttgggaggccaaagcaggcacatcacgaggtcaagagatcaagaccatcccgaccaacatgatgaaaccccatctctagtaaaaatacaaaaattagctgggcgtgatgtcatgtgcctgtagtcccagctactcaggaggctgagacaggagaatcacttgaacccgggaagtggaggttgtagtgagccaagattgcaccactgcactccagcctaggcaacagagcaagactccatccccctccccgcaaaaaagttaacatatcaacaaatcatctctacaaaaattagacaaattggctggttgtggtgtggagtgcctgtggtcctagctactcaagaggttgagaggcgggaggattgcttgagcccaggagtttgaggctgcagtgagctatgatcctaccactgcactccagcctggacaacagagtgaaatcctgtcttcaaaaaaagaaattaaaaaaaaaatcctgagtgcggtggctcacacctgtaatcccagcactttgtgaggccgagggggcgccgatcacttgaggtcaggagtttgaggccagcctggccaacatggtgaaaccccatctctatactaagaatacaaaaattagcctggcgtggtggcgcacgcctgtaatctcagctacttggaaggctgagaattgcttgaacctggaaggtggagatcgcagtgagccgagattgcaccaccgcgctccagcttggatagagcgagactctgtctgaaaaaaaaaaaaaaaaaaaacaagcccaagactttgggaaaagtttgcatgtgggtgcaccagatatccggccaagatagacaagccaagtagtggcctttgagcaaaaaaatgcatgtgtgaaaggtctttgggcccttttaccaccaagattttcccctcaaaatcccaccgtcccactcctcacactgctacctggtaggttgcttggccgtgttttttgtgaagttcccagaattgtatatacctcaaggcttcgtgcacctttatgtttgtgacacttcagtatgaagttcacagggacttggtgtataatggagacttgggggtggggatggcagccctgggatttgtgtcaccaatgaggtcaggtcagttccgcaataaatgtgaccttggcgtgtgggatactttggtaaacatctcttagctcttgatattccagggtcacctcctgattgggctggcgtctcctggcttaatgtggctgctcttcaaagtcacccctgcaatgtctttagggaaaagccctctagacttgacttgtccaacagttgccactggccacatacatgtgtggctgctaagcaactgaagtgtggcaggactgaggaactgattctaattttattgaatttgtaagatgtttaagtaaacggtatatagaacgttctagtcattgcagaaagttctcctggactggcagggctgcccctagcctgttttcagcgcttcaactgtttcagtgggaagggaaagcaactcttagcttgacacttttttgtgagacacagcctcgctctgtcacccaggctggagtgcagtggtgggatctttgctcactgcaacctctgcctcccatgttcaagtgattctcctgcctcagcctcctgagtaaatgggactacaggtacgtgcaccacgcctggctttttgttttaatagagacggggtttcaccatgttggccaggctggtctgaaactcctgacctcaggtgatctgcccgccttggcctcccaaagtgctgggattacaggtgtgagccactgcgtctggcccagtttgacttttggatactgtgttttagtttttttttcttgatacagggtctcactttgtcacccaggttggagtgcagtggcacaaacacagcttgctactgcctccacctcttgggctcaattgatcctcctgcctcagtcccataaatagctggccctacaggtgtacgctgcattctccggctgaatttttaaattttgtagagatggggtttcacaatgttgtctaggctggtctcaaactcctgagctcaagggatctacccaccttggcctcccaaagtactgggattacatgcctgagccactgctcctggtctatatacagtgtttccactttagaacattttgtaacaaagcagcaatacattgttttaagcctgagcaattactttataataaaaccagttattttaaagaaagttacaaagtaaaagcagctttagtagcctgcaaataaagccaaggcaggaaatgggtcctctctacagtggggctagtcctgggcaggaccttgagctccggtttggccagccttcaggacgcccagcccgttctagcagggaaggagtgataaggaattaagaggccagaccctgggttggccccttggccccagagccaaggtctgctgaaaaagccagggaccctgaagaaaggcagaattaggagccagaccctgcctctccccaccgctactttgactccaaccttcatcaaaaaatgatccccaaggccactgtgcttgggtctctggttttttggaccccgagtctgggtagaagttctccaacccacttatggctgaggaagggagacttacgtttcccttgcagggcacttgcctcctgcccatcccaccctctcaccttgattgaatttggaaggatgcccagctccccactccacccccaaaaccagcagaaccctcaaacagagtcacaggaccgctcccctgaggtttagcatcagtctttaatgctgtcgcacttcattgactagtcacacactttggtctcatgttggcagtggcaacttacaatgagtctaaaggtctgagcactggactggcctccagggaacagacatttgttccaactccccttccctccccaagatttcttcagaattccattatggccctatacagagagcactggctgccggggacaggttttgagtgtacaccaactatacatggaattataaaaacatatttacagacgttccacagtgctcctgtaatcagaagcaaagacccttttatcaaaagggattgtatctagggctgtgcaaaattcaaaaggatcagatccctttgaaagagtccatagtccatgaaacaaaaaattacctgggccactggtaagccccacgtgtgccaagattgccttacagaaatgtaaagagtgtgacccacaaagtgaggacattcagcttcactggagccagaggtcaggaaggccccttgctgaggccaggctcccagaccatcaagggagaggtggctgcacttgctggagtcactcactggaggctggctcccttggtcctgctggaacgagaggtattgcttgtggacgccaaccaggcagttctgcaggaatagtttaggttctcaatttgagatggccaaagagaagacagaattctccaggagaagagcaagacatgggagacaaatacagaataaagcacaaactgatcacacaacagaaaaggaggagtgtacagggtctgggaatcaagactgcaggttgacattatctaccagccagaagcaaaaagacacagagggatcaagtccatctgctggtctgcctctcacccctggccagggactggaggtggatgtgggcccatcccgggagggctgccagacccagtggggcagactggaatgccttttcctgctgttcccaccacctgatgccctatagctcgaaaaaccactgaagtctagtgtgcgactttgaaagattgtaatatatgctctggaaaacattcagcagtacgaaagccctccctgggccctcccaccctctcatggtccacaactggtagaaaggtccagaaatccttgagctctggaaaggtccctggtcagtccttggggagctcagatagctatattggaagaacctgctcaagtacggttcttgatgtctggggaatcctttcggggaagatcacttcaaactcaataatgaggtccccacgtttctcgggtgttttggggagggggaggccttctccaggaacttttcgccgcatgccaggcctgataacatctttgaatacgacgggtatcgtcctgccgtccagagtggggacgttcactgtgcagccacacagagccttgaaaagcaaaaggacagcattagatggaagctggctcaagaggctcagctcttgcccagaggccgtctgccatagataagacccatcaggcctctgcagctaagacctggcccccaaatctacacgtccccaccacgaaagctccacaacagcgccctggtcagtcctgttcactgttgtgccccaagcctggcacgcaccacacaccccaacacattggttcagcaaatactaaactgcttcaaaaagcagccatcgccctctacagacaccgccccacctggcaccttacctcccggaggctgatcctggcaggataaatgacatcagagccatctctcttaaagatattgtggggcttgtcctttaaaacaaagacgatatcagctggaatgttgttggaggtctggtctccttccttggggaaagtgattttggttccttctttccaccccttcttcacttcgatggtcaatattttgtcttcgtttcgaatgctctttccgtcggggtttagccgcttgtgggagattttcatcttcttggtacagccgctgtagatctcttcaagggagactcgaaggtcgtgggtgactgggggatcttgcttctttcgggcgggctcttgggcagagcgggagcggccaaagttcacgttggtgaagccacccatgcccatagggaagccagagaatgggtcatcaatgtccatgccttcctccccgttccgctgcccaaaaaaggtgtcaaagggatttctgccaccgaagaactcagcaaacatggcatgagggtctccatggaatgtgtagctgaaagaggtaccattggcaccaccgccgctaccgccactggggccactcccctttaggcctgaaaagcagatttagaagcagtcagatggctgaacagcagactctctctcgagcttcccttacagggggaaacagcttggaagccatgggggaggaacttttttgtctgtcaggggagagcaaggaagaaccccaagtttctacctctcactgccaacagcagagacgcccccctaccaacagtatttccgcgtagcctgacagtggaaaaggactcatgcggttaggtgttcacctccaggtgccacctaggccctgccactcctggactgacccatcctcctggcaacatcaccaagagatggctaaagacacatggtccagggtcggctttcggtaagtgtttactctcaacgttttagggctaatggtgcgtaggaagagaagaaaaaaaaaaacaaaaataaatagggagtttttaaatcctcacacattagcattcactgccaccatccttgcacaaaaagtcagctccagatcaagcccagaagccagcctgaatcatcaacgggcacaggaacaaaaagccctgctctccttaccctccgaggcggccccgctctccggacctgggcggccgctgcctcctgcgtgccctgccggggccaggtcatcacttcccgggaattatcccaacccagcccccaagcccacgaacggggtcggctcctgcattcacaacccctcgccccgcagctgagccggaggcgccgccccgcggaccccggcggccgagcccaggtgagcccgggtccgcagcgggctccgccgcgccgtccccgtcgtcacccccggctcccccacccccatgcaccgcaccccggggctgctcggggccgcgggaggaggcgcccggggaggggcagccccagacatgctagaagcttctggccgagcggctgggccaaggctcctcctcccaccgcgcggccgccaatccgagggcggaggcccgcgaggccggagggcggggcagctcggccccacggcccggggcgtccttcccggggggccgccgagaggggccagcgtgcctcagtttccctgtctgtcaaaaggcggggccgcgcccctggccgcgagcacacaccttcctccccgtagcggtcgaagatctcgcgcttgcgcgggtcgctgagcacgtcgtaggcctcagcgatctccttgaacttctcctcggcgccgggctccttgttcttgtccgggtggtagcgcagcgcctggcggcggtaggcccgcttgatctcctcgtccgacgcgccgcgggccaggcccaacgtctggtagtagtctttacccatgaccccctcctgcggcccgccgacccgctgtcgccgtcccccggctccgccgccgaccagtcccggactctatatacccgtccggcggaagcttccagagcccgccagccccctccagaaccttccgccccgcccgcccccgcggcgccggccaatcgccgccgccctttcagcgacacgcgacatccggggcggggcctcgccgtcaacggccgcccgcgcggggccacgccccctcccgctccgccctcggcaacacctccccgcggcgcgcgcgcacaggtcggaggaggccccgcccacctttcgggacgagccaatcgcgaccttctttccctctctacgcggccccagctaccctgcgtcccgccctccgcctgggtcagtaggtcgggacccacagcgaacttgctgttccaggaaggggtggggcctgggactacccagtcctttccccgggaggcgatgaacctgctcgcccttgtctcgtggggcctgcggtgggctcccgcccggtgacgccggacgaactacctaacctgtgtctgcctaacccaggggcccccttctatctacaacatggcaataagagaacctatcaggccgggcgcggagcctcatgcctgtaatcccatcacttcctgaggccaagacaggaggatctcttgagcctaggagttggagaccagcctaggcaacataaggagactccgtttctatttaagattaacaaacaggccgggcgcggtggctcacgcctgtaatcccagcattttgggaggccgaggcgggcggatcacttgaggtcaggagttcgagaccagcctggccaacatggtgaaaccccatctctgctaaaaatataaaaattacccgggcgttggtggcacgaacctgtaatcccagctactcaggagattgaggcctgagaatagcttgaatcggggaggcggaggttgcagtgagccgagatccggccgttgcactccagcctcggcaacagagcgagactccgtctcataaataaataaaataagtaaaataaagtaaaatgaacaaaaaacccaccagcgctattctcccaaccgtggggagaaggattttgggacggaagactgcctctgttctcacctcctaaagcaaggtgaggatctggacggaagcgcatctcccaaggtcctcccagtcccgccttcttccctttactgccctctcaagatcacttgccgctaaatttgaaatttatcttgtctcttggctttcaatgtgtcttccctcccagtctgacatcgccacctgggcaggggccaggtcctgtctgcactgggtccccagtgcctggaacgcagtgagaacctcataaatattccccgttcttacacacgtgcttctttttcttccccaactacctttataatttggggggacataggtgtgtcacacacctttcaaggcctctgtttcctcaattgtaggcaacacgatcgcgtttggctctgaaagtctggggtgcctctgtcaaggacagagctgatgggaaaaggaggctcagaaaggggttccacctgggaagggcccagggaagtgggggaggttcctggaagaactgcctgggaggtcagagccatgtaacactggctctggaaccagacagctgggcttcattcccagctccagcatttcccggctgggtaaccttgggttagttactaggcctttgctggccttagcttcctcatctgcacaatgaggaatgaggatagcagttgtgcccacatcatgagggctttgaagtttatatgagtcaacatttgcaaagtgctcagagcaggcatggcacaaaggaagcattgtcaaaggggtgactaaccattttcttagtggtgggctcttcagccatcacctcattcctggcagctaaaagattccagtgacagctgcccctgggcagacagggactcctgaagaagaagaccatcctcctgcctcctgaggcgggaggatctcttgagcccaggaatttgaggctgcaggcagctatgattgtgccactgcactccagcctgggtgacagtgagaccctcagcctccccataaaaaagttacataaataactatcaggagcatcatggcggatagttacataaataactatcaggagcatccagcaggcagatctggttctcttggcccactcaatgatctctgaggtaactgcatcagcaagaactctggactagaactggacaacccgggaggatggggctgaaattccctagacatcgagaaccatacttgagcaggggtcctgaagcaattatggggagagagaacttgatattttttaaaaagttactaggctgggcacagtggctcacgcctgtcatcccagcattctgggaaggtgaggtgggaggatcttttgaggccaggagttccagcctgggcaacatagtgagaccccatctatacaaaaaattaaaaataaaaaaaattagccgggtgcaatgatgtgagcctgtagtcccagctactcagtggaccaaggtaggaggatagcttgagcccaggaatttgaggctgcagtcagctatgattgtgccactgctctccagcctggatgacagtgagatcctgaacctccccataaaaaaattatataaataactatcaggagcattatggggaaaaactcagagcttgtgactttataaactagtattttataatataaatttaatttagaattacaagtgcagcagcctccaaaggctttaacatggctctgggtgggcctttctggttgttctaaagtttcttgccataggccaggcacggtgactcaacgcctataatcccagcactttgggaggctgaggcaggtggatcacctgaggtcaggagttcgagaccagtctggccaacgtggtgaaaccccgtctctactaaaaatacaaaaattagtcgggtgcggtggcaggtgcctgtaatcccagctacgctggaggctgaggcatgagactcgcttcaacccgagaggcagaggttgcagtgagccaagatcgtgccactgtgctccagactgggtgacagagtgagagtttcaaaataataataataataataataataataataataaaagtttcttgacacactggaggggaacattttgctaaaaacactgcggaagggatgtctttgtgcttggggtcagtgttagagctgggaactctcccctccttgagtaagcctgggtcatgttcaggaagttttgtttgtttgttttgagatggagtttcactcttgtagcccaggctggagtgcagtggcacgatctcagctcactgcaacctccgcctcctgggttcaagtgattctcctgccttagcctcccaagtagctaggactacaggtgcttgcgaccatgcctggctaatttttgtagttttagtagagatggggtttcaccatgttggccaggctggtcttgaactcctgacctcaggtgatcaacacgccttgatctcccaaggtgctgggattacaggcgtgagccaccacgcccagccagttcgggaagttttaatttttttttttttaatcagttctaggagccaggaaattaaacaaacaaacaaacccagtaactctctcctaatggacatggtactgtgacctgaacactcactgagaacttcagaatattactgaaaaaatggcctctgcgtcaacttcagcagatattgggctcttaacttggaaaagctgttatagttgtttgttgtgtcagcgtggctaagctctagaacctagttattcaactaaacactaatctaggtgttgctgtgaagttattatgttgatgcggttaggttagcacgtctacagttgcttgactttaaaaacaggacatgaccctcaaggatgtgaggatgtaagcgggcctcatccaatcagtctagagactttaaaaagccaacactgaggccgggtgtggtgggtcacgcctgtaatcccagcactttgggaggctgaggcaggagaattacttgaacccaggaggcagaggttgcagtgagccaagatcaggccgctgcactccagcctggtgacagagcaagactctgtctcgaagaaaaaaaaaaaaaaaaaaaagccaacactgaaagcaaacactgaggtttcccggcagaaaaagcatcagctcctgcctaagtttccagcctgctagcccacccagcagattttggtgttgtctagccagcccccacaagcatgtaagccaattccttgaaataaatctctgcacacaaacacagacacacacacagacacacacacacacacacacacacacacacacacacacacacacacactcctactggctctggctctgtgtctttggtaaaatcctgactgatacaggaactatgcaagtgagtctgaggacagttgctttagttcaaatcctggaccaactgtttccttatttcctacgtgtgtgatcttccacagcctgcttgatctctgggagcattaggtctgtcctccataaattggagataagagtagattaggccgggtgcggtggctcatgcctgtaatcccagcactttgggaagctgaggcgggtggatcacttgaggtcaggagtttgagaccagcctgtccaacgtggtgtctctactaaaaacacaaaaattagctgggcatggtggcatgtgcccatactcccagctactcgggaggctgaggcaggagaatcgcttgaacctgggaggtggaggttgcagtgagccaagatcacgccactgtactccagcctgggcaacagagccagactctgtctcgaaaagaaaagaaaagaaaagagtagattttacgctgctggtgttgctatgtggatgaaattgagaggaaatgaacaggaagtgaacaggaaatgaacattataataacatttttatttttatttttgagatggagtctcactctgtcacccaggctggagtgcagtggtgtgatctcagctcactgcaacttccgcctcctgggttcaagcgattctctgcctcagcctcctgagtagctgggattataggtgcctaccaccacacctggctaatttttgtatttttagtagagactgggtttcaccatgttggccaggctaatctcgaactcctgatctcatgatccacccaccttggcctcccaaagtgctgggattacaagggttgaaccctacacccggccttgtttttgtttttttttttttttgagatggggtctcacactgtcacccatgctggagcacagtggcacaatcttggctcactgcaacctccacctcccaggttcaaatgatcctcctgccccagcctcctgagtagttgggatcacaggtgcctgccaccatgcccggctaattttttgtattatggttttggtagagatggggttttgccatgttgctcaggttggtctcgaacacctgagctcaggtgatccgccggccttggcctccccaagtgttgggattacaggcataagccaccatgtctggcctataataacatctaacactgacatggccaagcctgttccaagtactcgatgaatattaactcatatacttgtcacaacagccctatgaggttgggctatcattacacccattttacaggtggggagatggagattctgagaggtcatgtgacttccccagggtcacccagagagtaaaatgctgaagtgtttagcatactgagtgcttacagtagacactcagcttgtgtataatgtgactcagatgatcataaagccttaattttaagaaaattgcattactcctgtcttcagctcttcacctgttgaaaaaaagaccttcaggccaggtgcggtggctcacatctgtaatcccagcacttttggaggccaaggcaggaggatcacttgagcccaggagttccagatcagcctggcccacatagtgagaccccatatctgcaaagaatgacaaagaaataagctgggcatggtggcacgtgccagctacttgggaggctgaggtgggaggatcacttgagctcaggaattccaagctgcagtgagctatgagtgtgccactgcacactagcctgagagacagtgagaccctgtctcaaaaataaataaaaatccaaataaatttggaaaagatcttcaaggctgggtgcggtggctcatgcctgtaatctcagcactttgggaggctgaggcaggtggatcccttgaagtcaggagttcgagaccagcctggccaacatggtgaaaccccatctctattaaaaatgcaaaaattagtcaggcatggtggcgtgcacctgtaatcccagctatttgggaggctgaggcaggagaatcacttgaacctaggaggtggaggttgcaatgagccgagatggtgccactgcactccagcctggacaacagagcgagactcgttctcaaaaaaaaaagaccttcaaaaagcgctatagccatatgagccaacaatcccactcccagtgggatacccatgtgaaatgaaaacctttgttcatatataaaaattcatggctgggtgcggtggctcatgcctgtaatcccagcactttgggaggccgaggcgggaggatcacaaggtcaagagatggagaccatcctgaccaacatggtgaaattccgtctgtactaaaaacacaaaaattagctgggcatggtggtgcacacctgtaacccagctattcgggaggctgatgcaggagaatcgcttgaacccagaaggtggaggttgcagtgagccgagattgcgccactgcactccagcctgggtgacagagcgagactccatctcaaaaataaaaataaaaaagatactattataatgttcatttcctggctcctctcaatttcatcaacatagcaacaccagcagggtaaaatctactttttttgtttttttttttgagatggagtctcatgagcgaatgtttgctgaggctttattagttattaccaacagcagttaaaccctaactgtccttcaatggatgaatggataaacaaatgggatccatccacacaatggaatactattcagctataaaaaggaatgagctacggatacaaaaaaacaacattacagatgaacctcatatgcattatgtgggtgaaagaagccaggctcaaaaggctgcatgattccatttcactcaaccttctggaaaaggcaaaagtatcaggacagaaagcagatgaatgcttgccaggggctgggacctgcaacaaatggagtagtttggagaattttttgggttggtgtaaatgctctgtatcttgattgtagtggtggttgcatgaccgtatgtgttcagagctgtacactaaaatgggtgaattttactacatgtcaattacacttcaatgaaaaaaaaaaaaagaaggagaaaaaccaaacaacccaggcaagacaggatagggcttgggaaacctctctctgggattcctgacacagcagaaacttgctaacgagccctggcttgtctagtcccagcttcacctcccctcacacacccagcgagccagctcattcatacacaacccaaaccagccaagccaggttctggaaaaagtcaagatccgacctgatctgcccatgggaaatacaaaaggagcttgtgagacacgacattaccaaacacatcacatctctggcattcaaatggtctcgggttccccccaaacctgaggtccagaaaagctcatccttggaagctgccgcagcttaggccgtctcttgcagtttctcccttggaaattactttaataaaggagctagttaccatcagctcaacaacgacccaacagatctaccagtcaccattgtgaatcagccactgctgggactgtgaagggaccagcaggatctagctgtccctacagacaggcactgtcagggggccacagtacagtgtcctcagtggcttgaacaaagtggccagtcttcattccaagggtgggtttcatttctgctgacagcctggttaccggaagccagatgggcaaacaaggggttcctcaagcctgcaacacccctcaaaaacaaagaggaattctactttggaggctggatcttgcctttctgccagcttcttatgggtgaggagggggtggaaattatttgtatgttccggttgacacgcagcatagtaggtgcatgaggatgatttggtgcctgttgagtaagtgtggggctcagaaaagcagtctcaaaagggaatttccaaaacgttctgagtttatgggaatatgtatggaatctcttcaaaatgacacctacttgtacaccatcatgccctatctaactgcaacccagagatggaagactcacctcttcagatcacattaaataagttgaaaatttgcataactggtgaaggagcaacacatggatgggtcttagggtttcaaccctatccccatggcccctcacaatcaagtacctcaggtaactcaatctgataggattttaactgtggtctcaggccgagtgggatggctcatgcctgtaatcccagcgctttgggaggccgaggagggaggatcacttgaggccaggagttccagagcagcctgggcaacataatgagatcccatctctactaaaaaattaacttgtggcctggaagcaaatactctcccccagcacccaagaagggcagggagtgaggcctgtcatgacacagaaggcctcaaaactcaaactgccaccagaaaaatatctctgctttttttttttttttttttttttttttttttttgagacggagtttcattcttgtcacccaggctggagtgcagtggtgtgatctctgctcactgcaacctctgcctcctgggttcaactgattcttctgcctcagctacttgagtagctgtgattacaggtgcccaccaccacacccagataatttttgtacttttagtagagatggtttcgccatgttggccaagctggtctcaaactcctgacctcaggtgatcctcctgcctcggcctcccaaagtgctgggattacaggcctgagccactgcgtccggccagatccttgcttttgaaagcacacatacagaacaccttcaggttttcatctgtttttcccagatagcaccagtgaaaaagataatgagtttccagaagaccacatagcgttggcttcctgtactcgcagtcagggatccccaaaggctacagcttcagaagtttccagagccaaatctggatgactgagttccaagcactgactcacccttgcctccgcctgctcccctgtgaatcagtgatctacctttaaggacttctcatcgtgtctctcatgacaggcctgtgaattccagatggttcaacagctcatgaaagctcaggggcaggatctggaaacaagagtaaggagaggaggtgaagaagtgtgccaggtactgcctgttcctttgtctgtcaaaagtcttttctttttttttcttttttttttgagacagaatctcactctgtcgcccaggctggagtgcagtggtgcgatcttggctcactgcaacctccacctcccgggttcaagcgattctcagcctccctagtagctgggattacaggtgcccaccattacacctggctaatttttgtatttttagtagagacagggtttcaccacgttgtccaggctggtcttgaattcctgacctcatgtgatctgcctgtcttggcctcccgaagtgctgggattacaggtgtgagccaccgtgcctggccagaaatttatgtgtttttcatttacagcacatctcaatttggaccagtcccatttctttttcttttttctttttttttttttgagacggtctgttgctcaggctggagtgtagtggcgagatcttggctcactgcaacctccgcctcccgggttcaagcaattcttctgcctcagcctcctgattagctgggactacaggtgtgtaccaccacgcccggctaatttttgtatttttagtagcgatgaggtttcaccatatctgccaggctggtctcgaactcctcacctcgtgatctgcccccctcggcctcccaaggtgctaggattacaggtgtgagccatcgttcccggcctggaccagccccatttcaagggctcagtggccccattggagccactagacacgattctggacgtcaggcagagaccaatgtagttcccctgtccatagggcggagcaaagtgtggaggggggccgggcggggtggctcaggcctgtaatcctagcactttgggaggctgaggcgggaggatcacctgaggtcaggagttcaagaccagcctggccaaccatggggaaaccccgtctctactaaaaaaaatacaaaaattagtcgggcgtggtggcgggtgcctgtaatctcatctacttgggaggctgaggcatgagaatcgcttgaacccgggaggcggaggttgcgtgagccgtcattgcgccactgcactccagctgggggacagaacgagattgtttcaaaaacaaaacaaaacagaaaaacaaagtggggcggggctttcattaaaaacggcagtgaagccaccccagaatggggctggggctcaaggttcttgcaggttgggggttcccaaatggggagcttttcgcgactccgtttcgcctttccttccctcccactcaagagtctcctcccatagtgacctcctcgccaaccagactccgcagcccgcgaccccagcccctagccctctcctgctgttcccggtgtaccccgggggccgcccacctcagaatttaccccttcggcgccgcctgtcatgtggatgctgccttgcctgtcactcaacttcttaccccgcccccgcgtctggcctaaccgtcgcttaccttggtttccacagcgacgccatcagggggcgtggcaaagggacgcgcggggcagagacctcctttggattggtggatggtcaagccccttctctttagcccctcctacaggcgttccgcccccttcgattggtctcgcaagttgattggtcaatcccctggtgctagtcctagtcttggttcggaccggccccaaggagcaggggcgaacgtgggcgcctcgtgccctgattggccgacggggcgcgcgcggcctggaggggcggggcggacgcagagccgcgtttagtctatcgctgcggttgcgagcgctgtagggagcctgtgctgtgccgcgcagttaggcagcagcagccgcggagcagtagccgccgtgggagggagccatgaagcattacgaggtaagaagcgagaaacaggggccgtgtggccactgctgacccattctttttccttctttgcgggaccacgggaccccactttctggtcctgtgccccgaaggaagagccagacggcgcaggcgcagtgggcaagcgttgcgccccgggccactcgtaaattccaatgcgcatgtgcgcaggaagtatttataaatctgcaacccaggctgttttgggggtactttttcttgggggtctctgcaggggctgggacgcttgcaggttccttgcagctcccccagcgggctgagttgcagactttgtcatgggagccacgaaggtgcgggacccttgctcccaatccgagggagtcttgcacaaatcttgcgccacgccgccgtcaccagcgtaggaaggggctttgctatcagtattcttgtgtacgacctttggaccccttccctcgcccgggacgttcccgggagacttaggcggtgagggaggtgcagctccacggctggctttcgcagagcagcgaagctgatcttgctttctggttatcaaagaggtcatctacgtcaacccttgggtgtcaccaaggagaaatcttatacccacccacagccactcttgaagcccaagtcttctgactcctaacttgggtctctttttcccttaaaacgaagtcttctgatgtgcttatcgccctaggtgataatataatattaataattcaaccaattatccctgaattattgctgacttttaagtaactatcatcaaataataaaatttgttattaaaattcaaaataacaatttagcaagtgcttactcttgtgctggtgagattctgttaccttgtataagaactattattattcctgtttgtaaggatgaataaagtctcagagatataaagtgacttgttcaaaggcccctagttagtaaatgcaaaacagataggggaactcaggacgccaaggtcttagttcctagccactatgccatgctggtcctcaaatgaaaaatagcaggtcgagcgatttcttgtttctcacttcccctccaatttaaaaaattctggcaaaatacacataaaatttaccatcttgactatttttaagtgtgcagttcagtggcattaagaacattcacattgttgtgcaaccatcaccaccacccatctccagaactctttgcatcttggaaaacagaagctgtagacgttaaatactaactccccattcctctccacctccacctctggcagccaccattctactcagccaccattccgtcttaatgaattgactactctaggtaccttggatacgtagaaggattttttttttcttttggagacagagtttcggtcttattgcccgggctggagtgcaatggcgcgatctcggcctactgcaaactccgcctcctgggtttaagcgattctcctgcctcagcctcctgaatagctgggattacaggtgaccgccaccatgcccggctaattttttgtatttttagtagagatgggggtttcaccatgttgaccaggctggcctcaaactcttgacctcaagtgatttgccctcctcggcctcccaaagtactgggattacaggtgtgagctagtgcgcccggctgtttgtttttattgacaagttgaatattactacctctgcctcctgccccctttattgctactatttttggaaatttacccacaatcctttgaagcctttttttgagacggagtttcgctcttgttgagtacgctggagtgcaatggcgtgatcttggctcaccgcaacctccacctcccgggttcaagtgattctcctgccccagcctcctgagtagccggaattacagtcatgagccaccatgcccggctaattttgtatttttagtagagacagggtttctccatgttggtcaggctggtctcgaactcccgacctcaggtgatccacccaccttggcctcccagagtgctgggattacaggcatgagccacggtgcctagccccttagaagcctttaacccacaaatcctgtaatttttgacatggtatcaagaatgaggaggtttgtattcaataatctctgtcatttaagttttcattctagaatgaagttctgatgtggattcccctctcaaactctatatctaaacctgtagtcccactactgtagtctcagctactcgggaggctgaagcaggaggatggcttgagcccaggaggttgaggctgcagtgagcccaaaaatcaggccactgcactccagcctgggcaacagagaccctgtttgaagaaaaaaaaaaaaaaaaaaaaaagctaccatgtccagcttgaaacatgcagtttggaacatccatatggcattttgcaaatgtagttggtttagttttgctagttaacagtcagataaagtaggcctctgagcaccctgggggtgcgtgcttttgttccaggaagctgggcacagcctgaggcccaagacttggactggagaatatgctccaccgtacttaatccttttctctcccagaaagaagggggagctttggccaggcatggtggctcacgcctgtaatcccagcactttggtaggctgaggtggccggatcgcttgaggtgaggagttcaagaccagcctggctaacatggagaaaccttgtctctactaaaaatacaaaagtgagccgagtgttgtggcacacgcctgtaatctcagctacttggaggcagaggttgcagtgagctgagatcatgccactgtactccagcctggatgacagagcgagagtctgtctcaaaaaaaaaaaaaaaaaaaaaaagggaagcttcaaactcactgttcaaagtgaccttgaaggaaaaaataaattgttattttgctgtgttgtttgttattctctgccaacctttgccaagtacccatagaggcgatagctacagggcttctgggtgggagaagcagttgtttcccggcccagcggattgcatagcaagcagattagtttaactgcatgtgtgtattgtaggtcagtaaaaatagaaaggatgctttcactcacacttaacaagcaatttgagaaaaggtttgtctacatcaaagaatatatttctggccgggcgaggtggctcatgcctgtaatcccagcactttgggaggctgagacgggtgaatcacttgaagtcaggagttcgagaccagcctggtcaacatggtgaaacctcgtctctactaaaaacaaaaaaattagctgggtatggtggcacgtgcttgtagtcccagctactggcttcgaggctgaggaatgagaatcacttgaagctgggaggcggagttgccatgagctgagatcacgccactgtactccagcctgggtgacagagcgagactctgttttaaaaaaaataaataaaggatatatttcagctgggcacagtggctcatgcctgtaatcccagcactttgggacaccaaggtgggcaaatcatgtgaggtcaggagtttgagaccagcctggccaacatgatgaaactccgtctctacaaaaaataaaaaattagctgggtgtggtggcgcacgcctgaaatcccaggtacttgggaggctgaggcaggagaatcacttcaacctgggaggtggaggttgcagtgagctgagatcgcaccactgcactccagcctgggtgacaagaacgagactctgtctcaaaaaaaaaaagaaaaaaatctatttctgcttgggactaaatccatcttcccaccctcaagcagtctgttgtccactgaaaggttggcccctggagagaccttggagattatgaagtgcagtttacaactgatagaggtaatgcccagaggggtgcaggacgtgctgactgtcacgcaacaaattaatgtctggttgaggactgttatcatggcagttgggatcccagcagtagtggagatcggtggctgtttccatagtagcctcatatcactgccaaatctcatctgatctgagaggaaaagttttccactctgtggcctaattgaggtgaagcctctctctagaacgggtcacctccaggccttggctgaagccgtcttcttagaataccagagcaggccttagcattgtcttggggtcagagctaggtcggtaagcgaactgcttatcctaggatacagtatttttttaatgtatttttttattttattgctgtttttgccactgcagatgagactcaaagcaatgagcccagcagcaactggaaaaacagctactacatcttgtaattgagcctgttaattcctgagaaaatcagtctgtcttcagcctccagcagtccaggtcactgcccatttcccgcagctgaatacccagaagcgagcctcttggggtcccccataacccacatttagggtgttttctttctttttttttttttacacagagtctcgcactctcgcccaggctggagtgcagtggctccatcttggctcactgtaagctccgcctcccgggttcacgccattctcctgcctcagcctcccgagtagctggaactacaggtgcctgccaccatgcctggctaattttttgtatttttagtagagatgaggtttcaccgtgttagccaggatggtctcgatctcctgaccttatgatccgcccgcctcggcctcccagggtgctgggattacaggagtgagccaccatgcctggccttttttttttttttttttttttttttttttgtgacagagtctcgctctgtcacccaggctggagtgcagtgatgtgatctcacctcactgcaacctccacctccccggttcaagcgattttcctgcctcagcctcccaagtagctgttattacaggtgggtgccaccatgcccggctaatttctgtagttttagtagagatggggtttcaccatgttagtccaggctggtctcgaactcctgggctcaagcgatcctcctgccttggcatcccaaagtgctgggattataggtgtgagccaccgcaccttgcccaggggtgagtcttattagcacctgatcagatgggaactactgttctactttacagataatgcaactgaagctcagagaggtaaactaagctggtcaaggtcacagagcctggaagccagggagctgaacctgggtttgtcagactccagttttgtccacactgatggcttctctgctgatgctgccctaggacagctggtggctctcctgctgtgttctgaggacagagcatccctgaagggagggcgaggtgctgcgggtcagtgtggactgctgggagagggtctttctctgccctaaaatcggatgggctgccccttgcagtaagggcaggattgagagtgatgagccttgcctgggtgcagtggttcatgcctgtaatcccagcacgttgggaggctgaggcaggaggatcacctgaggtcaggagttcaagactagcctggccaacatggcgaaaccccctctccactaaaaatataaaaattggccgggtgcagtggctcatgcctgtaatcccagcactttgggaggccgaggtgggtgaatcacgaggccaggagatcgagaccatcctggctaacacagtgaaaccccgtctctactaaaaaatagaaaaagttagctgagtgtggtggtgggtacctgtagtcccagctacttgggaggctgaggcaggagaatggcttgacccgggaggcggagcttgcagtgagccgagatcgcgccactgcactccagcctgggcgacagagcgagactccgtctcaaaaaaaaaaaaaaaaaaaaaaaaaaaaaaaaaaaaaatatatatatatatatatatatatatatatatatatatatatatatgtatgtatatataaattagccaggcatcatggtgcactcctgtaatcccaggtactcgagagactgaggcaggagaattcgtttgaacctgggaggtggaggtcgcggacgagctgagatcgcaccactgcattccggtcctgggcaacagagtgagactctgtctcaaaaaaaaaaaaaaaaaaaaagggaaagtggtgagccttgagctgtggtgagctataaagacctttcctatgttagcctgactcaggccaagatcctgagggggttggaggggatcttaggcttttcagattttcctgcaggcttcttgctttgagcagatggtgactcactgggcagattctcctggtggagtcccttctgtcctggctgtagctttgtacttaggccatttctttgctgtaggcactcagaatctcagagccccaggcttgagataatttttctggtttaacttctgtaaagttacagatgagggacctgagacccagagaacaaggccttttccagggctgcaggccagttcccctttgggttgggcagtattgattgatactcttcctgggaaggtggcaatgcttacgggctttggatcagtgctaggctcatatgcttaactgccactgacaaggtttggagcccacgggcaaggtctttagtttctcgagctagtttttttttttttttttcgtgagacagagtccccctctgttgcccaggctggagtgcagtggtgccatctaggctcactgcaacctctgcctcctgggttcaagcgattctcctgcctcagcctcctgagtagctgggattacaggcgcccaccaccacgcccggctaatttttgtatttttagtagagatggggtttcaccatattggccaggctggtcttgaactcctgaccttaagtgattctcccaccttggcctcccagagtgttgggattacaggcgtgagccacagcggctggccttgaactagctttttaatccataaaatgacacctgggtgtgcgagacccggctgacattggctgatggtgtgcatcttcccaactctgtgttcagggatatcaggctgacatctctaagtcacaggtagggtatttacatcacggaaagtggcaaatgctacagctgaggccccttcctctctcctgcccaatgttcatattgactgggataattgtccctgcctcccagggttatcgtttcaagggtttcttggtctggtgagcatcgtatgagcagatacatacctggaaagcctcagcttggtgcagcaccttgcagcagctaacatttgacaagtagtacggccctactcacctctggacctctggacacggggcagatgtggggaggaggggccgaggagggggcggggccgaggaggaggaggtggggcttgaggacggggaggggtgtcgaggagggggaggcgggtcccaaggagtaggaggcagagtttagcaggaaaaggcatgtcctgaggaggaggagggggcagggctgaggtggaggaggtggttcctgaggatgaggaggtagggctgagaaagaagaggcggggccgggggggaaggggaggccgagggggaggaggtggggctcaggaggaggaggcggggcaagaaggaagcggcgggcctggatgggggaggcgggaccagggagggggaggcgggaccagggagggggaggcgggaccgagtaacaagaaggtgggacgggatgagtggtgggctttggtgtgtgccaggtggagtagctgtttcagccgcacccaggtggatttagaggctccaccagctgggcccagcaaagccttctggactaactggttcctgagaacagaggagggttgacagccttgagtgagggcggtgcttggaaaggccttgcgactctgataaggtggttgggtttggtcgggaatcctgcactttcattgacaagcctggctgcgtgagaaaggccagagaccttgagctagttggtcaagttcaggctgggtcttaacaccttcttgctgatactgatagtggcagctgagaatgttttaatacctgggacatttcctgcggcagccagaatatagtaatcttcctagtaaattacggtgaatatagtgcttaattatcagtgtttttttttttttttttttgagacgaagtctcgctcttgtcccctaggctggggtgcaatggcgtgatctcggctcgctgcacctccgcctcccgggttcaggcgattctcctgccttagtctcccgagtagctgggattacaggtgcccaccaccacacttggctagtttttgtatttttagtagagatggggtttcaccatgttggccaggctggtctgaaactcttgacctcaggtgatccgcccaacttggcctcccaaagtgttgggattacaggcgtgagccactgcgccggcagtgtgagtgcttcttatctagtaacatatctaaatcgtgtactaaacataagacgtagatgctgttcttatctctacttgactgatggagaaactgaggcacagaaagtgaagcgacttgtccacagctagtggctagcagagctgggattcttctagaaccagagtgggctttgctgtgggtcgtgcactggggaaagaatcaagtgtgtggtggtggtgaaggacttggaggccacccactctgtccttgggacagtgacttaacctaagcttcagttttgtcaccctgtgaggccaggataacgacacctgggggcctgtgggggagtgtgaagtgctcagcatgcttcgcggcccacaggcagggtaaaaatccttaagcggagagggacccacgttaggcaggtaaggacagatcagcatccccagggctgcctgagatgcttttggcacctgacctctttggaaggcctcaaaactcttttttttctttttttttttttttgagatagagtcttcctctgtcaccaggctggagtgcagtggcgtaatcttggctcactgcaacctctgcctcctgggttcaagtgattgtcctgcctcagcctcccgagtagctgggattacaggcacgtgccaccatgcctggctaatttttgtatttttagtagagacggggtttcagcatcttggccaggctggtcttgaactcctgacctcgtgatccacccgcctcagcctcccaaagtgctgggattataggcatgagccaccacgcctggctgagaaaagcttcaaaacttaatgaagaaggtccaccaggcgccaggagacagactgatgtcaaatcatatgcccagaaggtggaggaagaagcccagatgccagtgcctcagttttgatataatgtcacacaccatgcaagtcacatttttttttttttttgagacagagtctcgctccgtcacccaggctggagttcagtggctccatctcggctcactgcaatctccgcctcccgggttcatgcgattctcctgcctcagcctcctgagtagctgggactacaggcgcccaccaccacgcccggctaatttttttttttttttttttttttttttgtatttttagtagagacgaagttttaccgtgttagccaggatggtctcgatctcctgacttcgtgatccacctgcctcggcctcccaaagtactgggattacaggcgtgagccaccacacctggctgcaagtcacattttgagatgatcagctctttccttcttcatgggaagacccttggggaagtcacaccacactcagagcccactttttaacctgttgtgacaaagaatcatcccaggaagtggaggctagaagacagtctggccaccaggtgcctgtcacagctgcctcacctaggagcacactgcttctgttcctgctccctcctagctgactgttccccaccgagccacaggcagaaggcctttttgcctgtaagtgggaggatcttagtgtgccatggctcagaaccttccctcagaggcttgtcatctgtcccctgctttcctcagttgttactatgctactgtctttcacagatacccaaaaccacgttcctgccctaagcacatgctattccctcggccctggatgcccttccctctgctttcctcatgcctggcccttcgtgttaccgagcgctcagcttccatgtcccccagagagaccttccttggccatccaatctaaagtccaaccccttgcctgtcaccctggcaccccactcatctccttcgcagcccatctgggcttgggttgtgttttctttctttttttttttttttctgagacggagtcctgccctgttgcccaggctggagtgcagtggtgggattttggctcactgcaacctccacctcccgggttcaagtgattctcctgcctcagcctcctgagtagctgggattacaggtacccgccaccatgcctggctaatttttgaatttatttaattttttttttttttgagacggagtctcgctctgtcgcccaggctggagtgcagtggcatgatctcggctcactgcaagctccacctcccaggttcacgccattctcctgcctcagcctcccgagtagctgggagtacaggcacccaccaccacgcctggctaatttattttttattttttatttttactagagacagggtttcactgtgtcagccaggatggtctcgatctcctgacctcgtgatccaccctcctcagcctcccaaagtgttgggattacaggcgtgagccactgtgcctggctaatttttgtatttttatttatttattaaaaaatgtgtgtttttgaggcagagtcgtgctctgtcacctagactggagtgcagtggtgcgatcttggctctctgcaacctctgcgtctgggattcaagcattctcctgcctcagcctcccgagtagctgggattactggtgcccaccaccacaccccactaatttttgtatttttagtacagacagggtttcattgtgttggccaggctggtcttgaactcctgaccacaagtgatccacctgcctgggcctcccaaagtgctgggattacaggcatgagccaccgtgcctggccataatttttgtatttttagtagaggcaaggtttcaccatgttggccaggatggcctcgaactcttgatcttaagtgatctgccggcctcggcctcccaagtagctgggactgcaggtgtgtatcactatgtctggctgcttttttttgtttgtttgtttgtttgagttggagttttgctcttgcccaggctggagtgcagtagagtgatctcgattcactgcaacttccgctttccggtttcaagccattcttttgcctcaggctccggagtaactgggactacaggccacacgctgctaattttggtatttttagtagagacagggtttcaccatgtgggccaggctgatctcgaactcctgagctcaagtgatctgcccaacttggcctcccgaagtgctgggattacaggtgtgagccactgttcccggccagtgcctggctaatttttaaaggatttttcttggtagagacgcagtctcaccgtgttgcccaggctggtcttgaactccttggttcaagtgatctcctgcctcagcctcccaaagctctgggattctaggtgtatgccaccgtgcctggctggcaactggcttcttctggcctcttggccacaagccctgggtccatcctgcccgtggctgtcctgttccccatcatctcaaccctcctggcacagcggcccttctgagatggaagctgccgagacaacactgggcactcaccgcacaggttgtgggcaggtcctgctggtccaggccttttcccgtcataggaccctgcctctgttttccagtccatcacttattcattagttcatttgttccaacatgttttttccctcttatcaatgctaagaatcgtgggatgaacgaaccacattctctgtcctcaagatcttttcatttaagccaaggcctgaaggtcgaggtctttggggccagggaggagaatggtgttctaggcagagggaaccgagtggtgtgtgcagaggcatggagcccagagtttgcatatgtcccacgttgagggatgaggctgacagggcagggctttgtagccacccagagagacctgtggacttcttttcattttttttttttttttgagatggagtttcactcttgtcaccaaggctggagtgcaatggcacaatcttgggtcactgcaaccttcgcctcctgggttcaagcgattctcctgcctcagcctcccgattggctgggattaccagctaacgtgccaccacgcctggcgtattttttgtatgtgtagtagaccgggtttcacatgttggccaggctggtttcgaactcctgacctcaagtgatccgcccacctcggccttccagaatgctgggattacaggcgtgagccactgccctgcctcattttgatggcaatgaaagtcccttttctgttttattcaattacctatgaattattgtttttagtagagatggggtcttgctatattgcccaggctggtctccaactcttgggctcaagtgatcctcctgccttgacctcccaaagtgcagggattacaggtgtgagacaccatgcccgaccacattctactgattttacctaaaagattccctattggagggcagttcatttttaagtcctcagggggccctcatgccatagtgtttttttttttttttttttttttttttttctgagatggagtttcgcttttgtggcccagtctggagtgcagtggtgcaatctcggctcactgcaacctccgcctcccgggttcaatcaattctcctgcctcagcctcctgagtagctgggattacaggcatccaccaccactcccggctaatttttttatttttagtagaaatgttgttttactatattggctagggtggtctcgaactcctgacctcaggtgatctacacgctttggcctcccaaagtgttgggattagaggcattgaggcactgcacctgcccaccatggtgtttgtaataaaaatgcacagagcatttgttccttattctgagaagtgtaccgtggattgcgtgtggggcttactgggagcagagcgactcaccccagttacatggttagctgcatgtgggtcatgagtgtttcccagccctgcaaggtgtaaaggccctctctgtggccctgtagctgtgtcacagtgacaggctggcatggccctgcctctgtccctgctcgaatcaggctcttacgtaagcagagcccaccagccattcacagactgcctgagagaatgcagggctttatgcagtctcctgggtccttccaaattcttttttttttttttttccatttgaaagtgaacagggatcactggccagagcgtgggatctgggcttgtcctcagggtggggtgccaagttgggggtgggggtgggaagttaacacaagccctggggcttcaggaaacatctggaaacaggctgaagtcacggagctgagcctccaggctccttgtggggagaagctgtttccccagacacctcaagtgtctaactcaggaggtgggcagatgggtggagctgctgaatgaatgtttctcaggagctgggtggggttggaggattgcagagggtggggtgggggtgtgtgtgtgtgcagatactggaattcctgaggagacatgtatagttggaaacagtgtattgcctgtatactacttgtttcagagaatatatatatatatatatatatatatatatatttttttttttttttttttttttttttttttttttttgagacggagtctcgctctgtcgcccaggctggagtgcagtggcgcgatctaggctcactgcaagctccgtctcccgggttcacgccattctcctgcctcagcctcccgagtagctgggactacaggcgcccgctaccacgcccggctaattttttgtatttttagtagagacggggtttcaccgtgttagccaggatggtctcgatctcctgacctcgtgatcctcccgcctcggcctcccaaagtgctgggattacaggcgtgagccaccgcgcccggctatatatatatttttaaattgagacagagtctccctttgttgcccaggctggagtgcagtggtatgatcgcagctcattgcaacctctgcctcccaggttcaagcaattctgcctctgcctcctgagtagctgggattacaggcatgcaccaccccacacctggcttatttttgtatttttagtagagacagggtttcaccatgttggccaggcaggtctcgaactcctgacctcaaatgatcctcccgcctcagcctcccaaagtgctaggattacaggtgtgagccaacgtgccgggcctggagaatagtttaacaaaatctcccagccaggggtgggggatccacagaggacagagctggagaatccctatccaaatactggtgtggggatggtttctggagaggctggctgtgtggtcttggtctgaatgtgacaaaatacctccgagaagcctctgcccctgactcacccaggccacactcatcaccttgtcacctcatgtttgagttctccacacagcacttggcaccttctgataaggcatgtttgtgtaagcccctggctctcccctgtaacccctggccctggggagggtctctggatacttgtggaacgagtatgtgtatgtttgatagaggccactgtcttacggagcacacaggacaggctcagccgttcagccgcataattgatgcctgccctcaaaagtcactgcaactgatcaggacgaggatgcttgcatgatctcggggtgtgcggccattctatgggactggcaggtctggctttgagtgcgggtcctgagcttatagcatatccttggtgatagtagcagagggttctgctcttccatgaaccgggctcatcttttgctgctgcggtgtttggccattccttttttttttttttttgagacagggtctcactctgtcgcccatgctggagtgcagtggcacgatcacggctccctgcaactccaactcctgggttcaagggattcttgtgccccggcctcccaagtagctgagaccacaggtgcatgccatcacgcccggctaatttgaaaattttctgtagagatggggtcttgctgtgttgcctaagctggtcttgaactcatgggctccagtgatcctcctgcctctgtttcccaaagtgctgggattacagacaagagccaccatgcccagcacgtggcttgttttgaaccattgacacatcagaatctaggaactgcggtgtccttttcactccttcccttctctgttccctccctggtccaagcacctgagtctctgccctgagttgtttctaagcctctcaccactgtctctgaagccacatttgctcccttactgttcctctgtccccagcagagagatgattcttcaagaaaccaaagcagcctgtggcattccagcgattcctcattgctcaagggtaaaacctaaagcacttgtcttggctctgctccagcctgctgcttagctgctccccctaaaatttactctgttccagcctccgggtgtcacccgcttccccaaagctctgtgctaccccagggcctttgcattccccgccagggagcctcatgctggccctcagctgaaatcccatttcctcagcagggtcctcccgggcacacccactgtggccctctgggccctctgcaccgctgtctcctctccacagctcctggtacatcgtgaccccgtattatgtaataggtgctttgttcatgtccccttgagcaccagcaagcctagggggtgggggggatagcctctctcagtcgtgcgcactgtcatatcccggcccttggatcgctgcccgcacgctcttgttacacccgcctgactgccattcatcactgagcccagcagctggcacaggcaggcccgacgcagcaaggggcacagtccgtgttggttgcgtgcatggcgagtgcaaactgcacagttagcagaaaaggtttttgggagtgacagacacccctgcacacggttgagccctttgtaggtctccgtgtgacaagtacatccctgctgtgcttgggaaagggctgcggcttgggaaagggctgtgtgggttccctggcttcttcctgctgtccccgaggagcatcggaaatgggtcacaacgcagcaggtaaccgcagcctccctcaggcagagctgagtggctcagtattccatccaaggcctgatcagagctcctctgggccacatagagcccccaggacatggctggactaggagttgggaccctgatctcccttcctggctgggtcacgcccgccatgccactgactcttgggggacctgcctggaaggtgaggaagtgatccatgctagctcgtccctggggaccaagtccttctgcacctggggtggtcacaaatctgctttcagaaaaatcatgggggcggcgctgggggctactcagctgggaaatcattacagacatttccgatcatagatcacactgaaagtttttgggcatctaactcagaaggaattctagatttgggatttttttttttgctctgagaaaactccaccctaggccaggtgtagtggctcacacctgtaatttcagcactttggaaggctgaggtgggcggatcacttgaggtcaggagttcaagaccagcctggtcaacatgctgaaacccctcttctactaaaaatacaaaaattaaccaggtgcagtggcacgtgtctgtaatcctggctacttgcgaggctgaggcaggagaattgcttgaacccgggaggcagaggttgtagtgagcaacctcctgcagaaattttctttttatttatttattacagaaacagggctctcactatcttggcctggctgcatgcactaccgtgtctagcctggatttttctttctatgcttagaacctttggtcactgaaatatttcttaaacattattttttcttttctttttttaagacggagtcttgctctgttgccctggctggagtgccgtgtcgcgatcttggcttgctgcaacctccacctctgagggcgggttcaagccattctcccaccttagcctcccaggtagctgggactacaggtgcacaccactacgcccagctaactttagtatttttagtagaaacagggtttcactatgttggccaggctggtctcaaactcctgacctcaagtgatctgatctgcccgccttggcctcccaaagtgctgggattacaggcatgagccactgcacccagcctaaaaattaaatttcaatttgatcaacatgatagggtaatcagtgctaaccttcagtcataaacatgtattataataagatcctatgaaggagggaaacagaaaccaacgtcaaagcaaaaagagagccaatgttaaagagcttattcatagcctcttatttttttttaaagggataatggtaggtttcaaattactgaagcatttagactctagatagatttaacagagtcctgtaaatgtttatgtaaaatttttaataccgacagtaggccagaaatgacatcttttgcaactcttaaagcttgggtaaaaatattagttacaggcgtgagccaccgtacctggcctattttattttattttattttattttatgttttttgagacagagtctcagtctgttgcccaggctggagtgcagtggcatgaactctgctcactgcaacctctgcctcccaagttcaagtgattctcgtgcctcagtctccagagtagctgggactacaggcatgtgccaccacacctggctaattttttgtattttcagtcgagatgagttttcaccatgttagctaggatggtctcaaactcctgacctcaggtaatccacctgccttggcctcccaaagttctgggattacaggtgtgagccactgtacctaatatttttttttttttttgagtcagggtctcattctgtcacccaggttggagtgcaatggtgctattatagttcactgcagcttgggcctcctgggcttaagtgatactcttgccttagcttcctgattatgctaggactacaggtgcataccacctacagccggctacttttgtttttttttggtagaaatggggtcttgcgatgttgcccaggttggtcttgggtcttgggtcttggactctgggcctcgagggatcctcctgccttggcctcccaaccatgtgtgtgtttaatgggcatttcttttttttttttttttttgagacggagtctcgctctgtcacccaggctggagtgcagtggtgtgatctcagttcactgccacctctgcctcctgggtcaagcgattcttctgcctcagcctcccaagtagctgggactacaggcgcccaccaccatgcccagctaattttttgtattttttgtagagatggggtttcaccgtgttagccaggatcgtgtcgatctcctgacttcatgatccgccccctcggcctcccaaagtgctgggattacaggtgtgagccactgtgcctgggcctaatgggcatttcaaactttacatgtccaaaatggagcttctgatttttcctcttgaacctgcatttccccacccccttggtggcagttccggcctgtttgttacccaggccctaagctgtttgactctgctctttctctcatgcctcatgtccaaatgtcagcacatcccttagctcagcattctagaatttaaccacttctcatcagcctcactgccgttaccaggcctaagccaggggttggcaaacttaatccagctagcaaagatcttaggctttgcctaagggtctctgcagcactgctcatctctgtcgtctcttttttttcttttagagacggagttttgcactgtcgcccaggctggagtgcggtggtgcgatctcgactcactgcaacctccgcttcccaggttcaagcaattctcctgtctcagcctcccaagtagctgggattacaggcacgcatcaccacgtctggctaatttttgtattttggtagagacgggttcaccatgttggccaggctggtctcaaactcctgatttcaagtgatctgctcactttggcctcccaaagtgctgtgattacaggcgggagccaccgcatccaaccatctcagacatctcagcagcagtgataccactgtggcagccacagatgacatccagtgagcatggcgtgttcaatacaactctatttatggacaccaaaatttgaatttaattttcacatatcatgaaataggtttctttgattttttttttccatccgcttaaaaaggtaaaaacgtcatgtattttttaaaagataaaacaaaagttaaagccatttttagtcggttcaaaagccggcagtagaccagagttgccctatcggctgtagtttgctgacccatttgtctaagccatcattaccttcacagaattatttccacaacctttaattggacttttttttttttttttttttgagatggagtctcactctgtcgccaggctggggtgcagtggtgcgatctcagctcactgcaacctctgcctcccgggttcaagcagttctcctgcctcagcctcccaaggagctgggactacaggcatgcgccaccatgcccagctaacttttgtatttgtcatagagatggggtttcaccatattggccaggctagtcttgaactcctagtcttgaagaccttgtgatctgccctccttggccccctaacccggctaagtttttaaaagtttttgtagagataagggtcttactatgttgcccagcctggcctcaaactcttgggctcaagtgatcctcctgccctggcctcccaaagtgctgggattacaggcatgagccagcgtacctgacctgcactcagcttttggcctctttataaaatactgtaggccaggcgcagtggctcacgcctgtaatcccagcacttagggaggcttaggcgggcagatcacgaggtcaggagtttgagacgagcctgaccaacatggtgaaaccccatctctactaaaaatacaaaaattagctgggcatggtggcatgcacccgtaatcccagctactcaggaggctgaggcaggagaatcactggaactcggcatgcggaggttgcagtgagccgagattgtgccactgcgctccagcctgggcaacacagtgagactctgtctcaaaaaaaaaaataaaaaaaataaactatacacctgcccccttcaactgccactccctgtcccctttcctttctttcttctttccatgtcgcacgtcacctttgaacatattacatatagcgatttatttcattgtcactctttctttgccaagatgtgagttccatgcgagcagggatttttgtctctccttctatagctgaaccccacagtccttaacagggcctggcatgtgtcagtgaacaaacgagcctcagtttccttacctgcaaaagaggatgaatacattgtaaaggagatgattcgtgttgaggatgagcctccgtgcctggctggttgtgagtgggcgggtggtgttagctgccgccgcgtgtataaagcctgccacgtagatcccagtctaggctctttggcaagctgagctcatgggggtggactaacctgtctgctggactcgggcagtcgggggttggcccggatgagctcctcctgctcctccagtcagtttgtatctgcagggctcagcctctggcccccttccagcttcctggtccgacagcgccttcctgccctgagttggagagagacccaggtgtcgtccccaactgccacccagctgtgggtgcagggatgcagttctggaccatcccctgggggtctgggacctggggagttgagtgtttggcctttacactggagctccttgagggctggccccagcggccaggagtgtcagttttttggtttgtttgttttttagatggagtcttgctctgttgcacatgcagcagtatagtggcgtgatctcagctcactgcaaccttcacctcctgggttcatgcgattctcctgtctcagcctcccccgtagctgggactacaggcccgtaccactatgcccagctaatttttgtagagacagggtttcaccatgttagccaggctggtgtcgaactcctgacctcagatgatctgcccaccttggcctcccagagtactgggattacaggcatgaactaccacacccggccgctccttttacttatgaggacactcctttctcttattaagtccaccttaaattcaggataatgtcatcttaagatccttaattatatctgcaaagacactatttttttttctttttttgatatggagtcttgctttgtcacccaggctggagtgcagtggtgcgatctcggctcactgcaacctccacctcccaggttcataacgattctcctgcctcaggctcctgagtagctgggattacaggcacccaccaccacacccagctaatttttttgtatttttagtagagatagggtttcatcatgttggccaggctactctcgaactcctgacctcaggtgatccacccacctcggcctcccagagtactgggattacaggcgtgagccactgcacctggccaattattatattttgtgtagagaaggagttttgacatgttgcacaggctgcaggaattccctaattcctaagcagtccctgtgttagatggtcttgcaggcacacccatttactagttggagaagcagacaggcaaggcaggtctgacaccgccccctgtggcagtgcctctcagtcagcattgaggacgcgcccctgcttttctaggcccattggctgtcttagctagtgacaggaaaacatgcaggaggcattgccacagctgtaaaccctgcctgggccccgctgtggtatgagttgctgatagaccttttgctctggtacagcctggctgtgtgaggctgtggggcagaggccagcgggctgggtcctcaggccaggcagagaggctcagttcttggtgtctgctggaggatcgcatccagggtggtgggttttttgtttttttgtttttgtttttcttttgtttggttttacccttatttctttatttcttcctttcttcctctttttctttcctttctctctctctctctccccctccctccctccctctctctctccctccctccctctctctctctctctctctctctctttctctctttttttttttttgagatggagtctcgctctgtcgcccaggctggagtgcagtcagtggtgcagtcataactcagccttgacctcctgggctcaagcagtccatctaccttggcctcccaaagtgctgagattacaggcatgagccaccgcgcctggcctttttcttttctttctttctttctttcttttttctttttttttttttttgagatagcgtgtcttctgtcccccaggctggagtgcagtggtgcaatgataggtcactgcagccttgacctcccgggctcaagcaatcctcccagtctggcctcccaaactgctgggattataggcgtgagccaccgtgcccggcctgccttttcctttctctgttgcacatagccctgctctctaggatggaggcattattttattgtaggagctttgggcctgagcaagctgggtggacactcacatgggcacttccaggctacttaccttgggcgagggcttcctcgttcccaagccccagttttccaagccacgtaacaggcatcacagtctttttcttttcttttcttttctttttttttgagaggagtctcgttctgtcgcccaggctggagtgcagtggcgcaatctctggctcactgcaagctccgcctcccgggttcacgccattctcctgcctcagcctcccgagtagctgggactacaggcacccgccaccatgcccggctaactttttttgtacttttagtagagacggggtttcactgtgttagccaggatggtcttgatctcctgacctcgtgatccacccgcctcggcctcccaaagtgctgggattacaggtgtgagccactgcgcccggcccagtctttttcttatagggcctgggtgaggcctgggtggcagtctcagcatagtcctaggtacagggtgagcatctgatagatgtcacgtctgaatgaaacgggcgagatcagcgtcgctctgggtgggccagtgctcctcggaggccctgagggcacaaccgcagggatgggtgtaggctgtgggtaccactgagaatggggggcaggcccagggctgagacccaggttctccaacttcccactgtgtttgtcttgtgccatattcatcctctatgaatggctgtggctgctcgcccaagccaggagctcgtgcgtccgatgaccatcttccaaggctggattgctacctgctcgctcggggctctgctggatgggaacagcagctccagcttctccgggtcccgggctaccgctgcctctgcacctggccctggcctcggatccgagagcccagagacattggcattgagaccctggcacctctcgtcttgccagcacaggtagaagacaggagcagagcggtccagggacctgggagtgggaggtcagccactctcagcccttcctccccaccctgggtgacattctgcttccactgtggcgcctcggggaggctggtgcagccgcccccgggtgccactgagaaacgaggtcatacactgaggccactggggaaggtggtatttctggccgagcaggtgtggcctgtgcagggttcctggcagctgagccctaggtcttctcagccatcctggcattagcaggttgacttgatatttctggaagtgggaaggaaagggagccgagagggctgagccgctgagccggagtccagatgaatgtgccggagtctctgcatttgtgatgggggcgaggtgatgggggcgaggtggccggcgtggctctgggcatgatcgggccaggcctccgacctctatgctgggcattggctggacagggagctcaggcgatgagtgcagcagcgcttgtgcccggcgcggggatggtgagtgcctggctggccagctgcaggacctgtcaggccctttgtgtctttacctggggccctggttgcactgaccagggctcgcacccccagccaggcctcttgtgccccagactcgggagatgcttcctaccaggaagtgcagtcccctgcggggtccgagagagcctgccggagctttgagctcaacaggtgggctgtgcggcaccacatcagctctgcaagggggccctggaggcccatgtgtggtggggtatggcctggctttcaacatgcacgcgtggtcttctgggctctgggatttactgcttagatcttggcctcttcatctgtgaaacggagctaatggctcctgctccctccggctgctgcaggagagatgtctgggaagctgtggcagttccagccccgggcagggaacgtgaaataactgttggtcgctgttctcactcatcaccattaggcaggtcacgtcctaggacacacagaagtttcaggttcataagccatgggagatgaggccggcccagaatccaagcttcccgctctggcccgggtctgcccctcttctggggctgagagggcaggcaggtgccttgctgggtcctgtggtgtggactctgccgccagcaaggccattgaacctgcttgtttacagccgggagaggactgggaagcaccagtcttggcttgtttgtgaagctggggaagccgaagctccagaggccttctgtgcatggctgtgtgtgccaggccttcaggctgcgcctccaggggatgagcaggaattgcaggctcagctcttccagccttggctcaggtggtgcctgctcctccctccttccctgtacctctcatccccacacccactccactctcaggccacacccactcttcacctccacatctgtccagaatttcactgcttgtctctgccttgtgctttttttttttgagatggagtttcactctgtcaccaggttggagtgcagtggcctgacctctgctcactgcaacctccgcctcctgggttcaatcgattctcttgcctcagcctcctgagtagctgggactacaggcgtgtgccaccatgcccagctaatttttgtatttttagtagagatggggtttcaccatgttagcctggctggtcttgatctcttgaccttgtgatctgcccacgtccgcctcccagagtgctgggattacaggcgtgagccactgcgcctggccttgtttttttttttttgagacagggtcttgctttgtcccccaggcaggggtgccgtagtgtaatcaatcatggctcactgcagcctggaactcctaggcttaagcgatccttctgtcacagcccctgaggagtaggtaggaccataggtgcgagtcaccacacccagctaattttttatttttgttttttgagatggagtcttgctctgtggcccaggctggagtgcagtggtgtgatctcggctcactgcaacctctgcctcctgggttcaagcgattctcctgcctcagcctcctgagtagctgggattacaggtgcccactgccatgcccagcaaatttttttgtatttttatttattcttttttttttttttttttttttttttagacagagcctcactctattgcccaggctggagtgcagtggtgcaatcttggctcaccacaacctccatctcctgggtttaagtgattcttgtgcctcagcctcccaagtggctgggattacaggtgtgtgccaccacacttggctaatttttgtgtttttacacggggttttaccatgttggccaggctggtctcgaactcctgacctcaggtgatctgcccacctcagcctcccaaagtgcttggattacaggtgtgagtcaccatgcgtggacacagctaatttttataaatactttttgtggaggcagagccttgctattttgcccaagctggtcttgaactcctgggcttaagtgatcatcctgtctcagcctcctaaagtgctgggattccaggcgtgagccactgcgcccagcccacttttcacctctctatagctccctctttgctcccagcttctgccctcactcctccagtctgttccacccagcagtggcaagcaggtaaagctggggaagccaagtcttgaacctgagccaagtctcatccctcctctgctcaagaaccctctatggctgccacttcactcagagtaaaagctaacgtcctccccgtggcccacaaagccgtggcacagaccgccacatcacctttctgccctcacctcctcccactctctccctgactcactctgctcaggccacacaggactccttcctgctcagccacgctaggtatggtccagcctcagggccttggcacttactgttccctctgcctggactgcactggttcccccactgtctactggcctttgttcacacgccactttctcagaaagggcttctctgaccactctcaaatggccatcctcttggaggttgcagtgagccgagatcgcgccactgcattccagcctgggcgacagcgagactctctcaaaaaaaaaacaaaaacaaaaaaaaccacattgtgacctcccccacaaccttctagttttgttcacaactcttggtgacaaaacatgctatggctatctgcccccaccccctgcttgcccagcacgcacaggctagaattcaggtcccatgaaccccagaggctggcttggtttttttcactgccatatcccaggaactggaacagtgcctggggtatgggaaggagggagtcaggaatgaatgaatggataaatgaatgcaggctccctgagctctcttggctggtggcagggccagggttaaggtcccattctgcaccagagctgtctccgtccctgacatcggctttgggactgttcctgagccggctgctgcgggtgcccttccagcaggcgggagtaagtctgtgcggccacaagggggcagtggggagcgtcgcagcctccgccgcttgcagccagtcatcccggtggtgacgggtcagctcggcctctgcaccgaaagtatctcgctattgttagggtttgggttcactgtgaccagctgggcgaggcatcagtgcaccagctctctggccctggcttcctgtggatgggccccttcaagagcatggtcagcgtcccaggagaaggggcctgtggatcctgccagggtttggcccccttgtgcacctggcatggctgttctgctagtgttggtctaatcttatttatttatttatttatttatttatttatttatttattttgagacagggtcttgctgtgtcgcccaggctggagtgcaatggcataaactcagctcactgcaacctccaccgtcctgagttcaagcaattctcctgactcaacctcctgagtagctgggattacaggcacacaccaccatgcctggctaatttttgtatttttattagagacggggtttcaccatgttgggcaggctggtctcgaactcctggcctcaggtgatctgcctgcttcggcctcccaaagtgctgggattacaggtgtgagccatagtgccccgcctaatcatatttattctttttttaaattttgagatggagtcttgctctgtctcccaggctggagtgcagtggtgcgatatcagctcactgcaacctcctcctcctgggttcaagcaattctcctgccacagcctcctgagtagctgggattacaggcatgcaccaccacgcctggctaatttttgtatctttggtagagacggggtttcgccatgttgtccaggctggtcttgaactcctgacctcaggtaacccgcccaccttggcctcccaaagtgctaggattacaggcatgagccaccgtgcccggtcatcatatttattctttttttttgagatggagtcttgctctgtcgcccaggctggagtgcagtggcgcgatctcggttcactgcaagctctgcctcccgggttcgcgccattctcctgcctcagcctcccgagtagctgggactacaggcacccaccaccgcacccggctaattttttgtatttttagtagagatggggtttcaccgtgttagccaggatggtctcgatctcctgacctcgtgattcgcccgcctcggcctcccaaagtgctggcattacaggcgtgagccaccacgcccggcctatatttatccttaataagatttatcctaaactggggatgattacggtaaccctgtcagatggcagctggggacagcccactttgccatgagtagatggaagttcagagaggttgggtaacttgcccagggccacacagccaggaaatgggcaggtctgcttctctgggttgttcacccaccaggcgggcgggttcccaggagctgtgacaagtgcttagacaacgagagccccccttttcactcctcctgcccccattagtaatatcttcatgaccacaaagacagtgaagacgggctctgttgcttgcggcactcccctctgggcttgggaggcacaaacctcgcccctgctccctcttgcagggtgcgcttcacgccgcaccgtgtgtcctggctcttggctctgccctgacctcgtgctgcgacgagttgctgttggctgggccccgggaatcttgggcctcctggtgagaattcctctcaggctagtggaactgtcatcacagagccacaggccggcagagccaccagcctgtgccccaggccagagtgcctgcctgtctgcccgttcctgccctctccctgcccgtcgtgcctgaggctatgtggtctcaccccttgcccgtggccagtgctgggacctcgctgacaccagtagcccccctcccacaggtatcccttcatccacccagagcatctcagcccctcccagcccctccgagtggctccgtgggcttcctcagaaggtcctgtctgtcctccctgcctcaccgcttctcctggagatggggccagagcctgccacctccccgtctgtgctcaggatcccctgcctggggctctgttcagcagctgcctgtaccctctgcagccctgggcttcccctgggagcccctgccccctgttggcctcaggcctgggcaggcgtgtgtgtgtgtggcaggcacagagcagagattggggtggcagtggggtgtggggcgcggagccctcgatgaggtctcacattaggccctccctctgaggggtggggaacctctcctgctcctcccacccgactgtttttattttgatgggtatgtggggcctgtttgttacccctcacccctttaaacaataatttattgaggtgaaattcatgtaacatgaaactaaccatttaaaagtgaacagtggcattgagtgcacgtgcatcattgtgcagcctccacctctgtctcgtcccagaacattttcctcactctgaaaggagaccgggtacccagcagcagccactccccattccccccgcccagcccctggcccctccaatttgcttttctgtctgtctgctctgggtattttgcatagatatgggacctttgtgtctggcttgtttcctagcgtaacttatttcttttaccccacctggaatatcttatttaactttcttacttagaaataattataggccgggccaggtggctcacgcctataatcctagcactttgggaggccgaggtggtggattgcctgagctcaggagttcgagaccagcctgggcaacatggtgaaaccccatctctcctaaaatacaaaaaattagctggatgtggtggtgtgtgcctgtaatcccagctactctggaggctgaggcaggagaatcgtttgaacctggggggcggaggttgcagtgagtcaagatcgcactgctgcactccaacctgggcgacagagtgagactctgtctcaaaaaaaaaaaaaaattatagagacacagggaattgcaagaatagtatggagaggtctcctgctccccccagagcctttcagtcctctctctaggaggagatggccgacgagctggggatttggggcaggaaatgggagacggacggccgtcccactgaggactcatcctgcccaggtggccctagccttgggcatttcttgtctgtaggggcccctaggtgctgccttgcagcccgggcttacctccttgcaggtttgggcgtctcctctccttgggcctcaggctggcctgggcaccactgctgcagctgtgagcgtggcccctctctcgctaccccctcctgccgcagcccggcgtcctctcccagcagctagccgggaccccgatggccgtactctccctcttgggccctggtttggtgcccaggttggggggagcagggtacgatttcacccctcccactagcagctggctggacagggagaggggctggttgtattttaagctgttgagtggttcagcaggaactcggaggccttctctccctgtggacgctaggctgccttcctacaggccacacgggcttggaagcatgtgggcactgcctgcctggggcccaggaactattaatatacctgcagccacagggcaggccccgtgcccgcccagggccctgctgtgctaaccctttcccgtggatcccgccccgtgtcctctgtccctatcctacatatccccttggtggggcccaacgtcctgcgtggtgtgaccgagctctttttttctggcccctccatgtgccagctctttggccttgttatcgctgtggcttggaggagttcagtaaccttcccctagaggccacaaggccaggcagtgcctggagttgacagcagggactcaggaggccccgtgggccaggatttcctggctgctgggcccattcccaccctcctgtccaggaagtgggggcgagtgtgtcatggctggggaaataggcccccatgctgtggtgactgccaggccagcaggggagtggggatctgaaccaaacccacgggcaacaatgcctcctatcccatggggtgcctcccatctgtcaggggtcacctagtgtaccccatgcattgtctcaggggaccgtcacagtcctgggaggtagtctgcttcctacctgcccccttctgaggcctagagagaggtgacatgcctggggtcccccagggactacaaggcagggctggttacggttcccgagtgcaggccaccaagcccccttgtctcccgctgtcgttgggaatgtgcaggaggggtacccagcttctctggcttgaccgtggtgccctcatcttcaggatgggccctagctgccgtggcccggtctccctgggctctgggtgggtgggcctgccctgggatggccccagcccagaggtttgtttctgagcattgtgtcctgctccttttcctcaggcagcctctgggggcccccgctgggtttctgtgggtaggaagggtcccccaagaattgctggctggtggctgacttgggatcaggcctgcctgcttgccacgacccctgtataataggattgcactgacccctgcatagggtgggtcagatccccgggggctgcctccctccagccctgcccctctgcacccccatcgttcatcactggcctgggggctcagggagggctgggccagactcctacctcaggggctggcacaggcctggctcttggacgcaggaagcgccgggctttagtggggcgcaggtcctgggtgagggtgcagtgtttgggctgactcagtggaaagcctgccccacaggtggctataaggtgagaagtgggtggggaggaaggttggggagacctcatcagcccaagctggaggcggttgcctaaaacttccacacaccccgatcctttccacacttcgagagaggctctctgcacccataactccagaatctgtcacctccctggtaacacaaatgcacaaggaaaataatccaaagtgtctcttacagctcagaaggggaaatggatgatctgtctcgcggattctcaaaatagctgggatttctccaagcccagtgaactccctaggcctgagctgcgggctggggcctgcacggcccgctggcctctcactctcctctagccactggctctgtgcagggcgggggctgggaggtgttgtcatgcctgcccctggggctttccctgtgctggtgccgttgagggttttgaggtgaccactcaaaagctgctttcagggcagcctggctccccggggagactcccaagcccccctcagagaaggtctgtggcatggctcctggggggcgcagtctggggtggttttatatttagctgggctgtggctgtggttgccactcgggttacatctggcacagaagtcggcagtgccagggccggcacgggctcctttccagcaccgcggcagaatttgatcgcgcttgcccggcccagggctgcttcccgtggggaggtcggtggtgggggctgacggccggcagctggggctgctggccaccgtgggcagagccgagtggcagggctggtggcaggcggcatggacttgaacttgagcttgttggcccgggaggccaccccaggcctcctccctggcctcaatgggctccccaggcccacacccccaaaggtggccaagaaacctaaaaaggctgttctcttcttcgaggtggagattctggacgcaaagacaagggagaagctgtgtttcttggacaaggtaggactggggcgtgggctgcactgggccaagggcactgggcccgggaccccaatccttatagcccaggagctgtccagtggggccctttgtgccccaccccctgccctatggaggggtatgccctcacttggggtagggtggatagccatgtcccctgggtgtggcggggaaatggaggcacaggagtctcagtggaccctgcggggattttggtcctgggagggcggtggaggagtgagccttgcccctgctgaggccgggcctgggggaaggggcttgcgctgtccctggggaggacagagggcctttgctcctgggagagtcatgggtgagaagtggagaggaggggcagagaagcaggcttgccttcccatgcttaatccgccactagccgggctgggggcctgctggctgagggtaaaagtggagccccagacccctgctgtcactgcactggcagggccctcggtggtccttccctgactgcaggcagaggcctggaccccagcccttcccccttcccatagctacagcccaacccccagcctgccatcccctttagtacctccccatcctgagtctgggctccccgcagagctgacgtccctgcgcctgtgcttcccccaggtggagccccacgccaccattgcggagatcaagaacctcttcactaagacccgtgagttctagtcccggccacactgcccctgcaacccctttgaccagggaccttagggtgggagggatcccatcctgcacccctctcccaggggcctgcagagatgccccagtgtggcccaggcttctggggcgtgactggggcaggcgcctccacgtggcactccgcaggaacgcccttgctaggctctgggaaggacaagatcctgcttctgcccgcgctcttctggcttgtgtcctgaaaccgcacaagcctgagggtttgcccccaggtgggaggagctgtggagtcctggggtccttgcaccctgggaaccctgagaagctggcacagtggctgggcagcggaccggctgagccctgccaggctgtgggctgtaactgccctgttctccccgcagatccgcagtggtaccccgcccgccagtccctccgcctggaccccagtgagtacagctgtccactcggcccgccccctgggctcctgggtggcagtgggagaaggcccgggtagcccctgagccctggcccgcctctctgcagagggcaagtccctgaaggatgaggatgttctgcagaagctgcccgtgggcaccacggccacactgtacttccgggacctgggggcccagatcagctgggtgacggtgagtcctgaccctacccacggcctcttttcccgtcagccacgttgggtgactcatcttgcccccctctactctcaggtcttcctaacagagtacgcggggccccttttcatctacctgctcttctacttccgagtgcccttcatctatggccacaaatatgactttacgtccagtcggcatacagtggtgcagtaagtggggcaggtgggaggagggtaggggaaggcagaagacctgccggaccagccccagctgagcctgctccccccgaccagcctcgcctgcatctgtcactcattccactacatcaagcgcctgctggagacgctcttcgtgcaccgcttctcccatggcactatgcctttgcgcaacatcttcaaggtgagagcccgtccccgcctcacccctaagccccgcctttctgccccaccccgccccgcccccaccgagccccaccccaaggcccttcctgtctgccactacgccccagcagagccctacccctaggccccgcctaacctccccagccccgccctcgcagagcctctagaccccgcccgtcctccccagccccgcccccgtcgggcccctaggcctgcctatccaccctagtcccacccctaggcaccgcctatccccccagccccgcccctgcagagccccgccccagtttcacccctaggcccctcctgtccaccacgccctcacagagccctgccctagcctcaccccttggccccgcctatcctccccagccccgccccaaggcccctcctgtcctttcccaccatgctcccaggcccctcgggatgagacatgggcagcatctgccttgtccggtgctggcccaagtcccatccctgccctgctccctttcagaactgcacctactactggggcttcgccgcgtggatggcctattacatcaatcaccctctctacactccccctagtaagtggcctcagaccatccttccctcccccacggtccccacccagcgggtcctcccctcatgggctcccctccctgcttcctcttcagcctacggagctcagcaggtgaaactggcgctcgccatctttgtggtaaggaggctgggtgtggggacggggtcgggggagtctgggcggccctaggctgatcctgcttctctgacagatctgccagctcggcaacttctccatccacatggccctgcgggacctgcggcccgctggtgagtgcctgctgggggcagggggacagctgggctgggtgagggggtctgactttctccttctgtcctgcctgccagggtccaagacgcggaagatcccataccccaccaagaaccccttcacgtggctcttcctgctggtgtcctgccccaactacacctacgaggtgaggggctgccttacccctctctgccctgggacttggggtcccatgtggagggaccagcccctaggatggggcgcctggctgggcagctgcttttgccgcctgcactgcgagcattgggaggtggagaccgcggcctctctgctgtggtggcggggaggcgtgtgccgctgggcttccgccgtatacagccccgcctccgctggaattgggttcccatccctgactcagaaagcaggggcggcgggaggtggctggctgagtccaggacagccacatacacgggttgcgaggctgcccacgctcactctccgcccctgcccacaggtggggtcctggatcggtttcgccatcatgacgcagtgtctcccaggtgagcctgccgccctccctcggcggggccctgcccctccgggccggcagcccctccctgacgcccgttctttcctgcagtggccctgttctccctggtgggcttcacccagatgaccatctgggccaagggcaagcaccgcagctacctgaaggagttccgggactacccgcccctgcgcatgcccatcatccccttcctgctctgagcgctcacccctgctgaggctcagcccctcaacccggtggcattctgggggaggagtggggcccacagctctccagcacccggaataaagcccgcctgccccagtcggactcgggctctgtgtgtttctttccggggttggggaccaccacactgcccttcactctctccccactctcgcgtcggagcagtaagaggggactctggttgaggggcctgaaggcttttatttgactggtccatagggtggggggtgcaccccctacagggccaccttggggtccacttccccgggtccctggcctttggccaactctgccgccttcttctcccgccgcttcttccgctggagcagcctccgctcccgctcaaactccttcatgcgcatcacatagctgggggaaaagcacgagaggggctgtcagggtccctggccaggacacgccccccaagccctgggaagcggaggggccgtcccagagcactgtgggggaggcctctgaagaagacatgtccgagtgcctgtggcttgggtctggggtctgcccacgcaggtggcagggcttcccactggaacctgggcttggccactcccctaggtggcttcagccacctgccctgtccccatcaaacaggcccctagagagccctctctgggactaaggtggggcccggctagaaacctcagtggcagttcaggtccctggcctctggagccacatcctgccaggggccaggcctgggtggggtgcaggctgtgggtgttggcgggggtgggaggggggcttgggcgggctgggcatgtggggggcttgggtgggccaggggtgtggaaggctgggggtatggggtgttgcgggccggggtgttgggggctggtgtgggggtgctcactcgcggtgctcgcagtagtcccagtcgtgccgctcctgcttgcaggccaggaagttggggaagctgtcacgcttgcacttgagcagccggatgaggtggtgggcgcagtagtcccgcagctggagcctcagctgcgcgtccatcatctcctgctgtgtggccaccatctctgcagggagtgggcggggctcaaccaggctggaggctccccaccccaattccggggatccccaggggaccgaggcacacggcttcaggaaggcacggcttggggtgtcccccattcacatccagatggcagtggatggcagatgcctttgacggatgcactgtcctgaaggggcctccttttctaatttgcacaaaggcaactccagacaccaagggccagacaggagaaggtggctccccatcaccctgaggcacctcaacatcccgtgccggatccttgcctcccctcccacagggatgcccgtccccagctctctacagccccgctctccagagtccgagttcagaatccaccttctcccagagtaaccctcagcccctccacctgcacctggggctccaggcagcactcccagcctttcttgtctgcaacccacccaaggcccagctctgcactggccggcggcgtggcctctctctcagcctcagaactgaccatccggtcatggaagttacccgagcatccactgagctaacagtacctgtaaggtacttaggcgtgggctcagaagacagctggactagtatctgggtcccggtgccccactcacctagcaaacctgactccggacaaatcaaccttcaggagggggccgatgggagcatgaggaatcctggacactcaccccggagcctgtgcctggcgatcctgcactcgttccccaccgcctccctcagacccagcctccctagccctcctgacgtccaccacatctttctcggtcccagctccttcccatctgcgcaagtgagacgagatatattcacatctcaatggcagtcgtcccctgctggcttctctcccctttgcttcccagctgcgattctctcatcccactgaggcccaggtcctcctctcctgccccttgtcccattccctggcttctgccctaccccctcactgcccagacacgggctctcacagggccacccaacagcccaggaccccagcctcccgcttccttctttcctgtggctcctcccacatccctcctccccaggtttcctcccatctctatggctgccttaccttacgctttgttctgggagcctttttcttttcttttgagatggagtctcactctgtcacccaggctggagggcagtggcaagatctcagctcactgcaacccctgtctcccaggttcaagcaattctcctgcctcagcttcctgagtagctggaactacaggcgcctgccaccatgcccgactaatttttgtatttttagtagagatggggtttcgccatgttagtcaggctggtcttgaactcctgacctcaggtgatccacccaccttggcctcccaaagtgctgggattacaggtgtgagccactgtgcccggcctgagagcctttttctctgctgccgccccgtatgtagatgagcccgatgtggtccctccaccccacacctcgcttgagccccaggcctgggtatcacctgcagcccctggctgttccctatctgcacttggagctccaggtggcaatcctagactcctccctcttttgtcttgaacttataatcagctagcagcaaggactttagactgcctactgtgtgcttagtggtggggatacagcaggcaacacaacacacaagtgtccctgccctcagagggagacacagaacagacagaagacagagcaccacagcgtgtctggcagtgcttaagtattagggagaccagcctggggagcacagaaagatcccatgtccagaaaaaaataaaattatctttgcacggtagtgcacacggagtatccagagctactcgggaggatcgcttgaacccaggagtttgaggctgcagtgggtgataaccaccccactgcactccagcctaagcaacagagcgagagcccatctctacaaacaaataaataaatatgggccaggcgcggtggctcacgcctgtaaacccagcactttgggaggccgaggcaggtggatcacttgaggtcagaagttcgagatcagcctggccaacatggtaaaaccctgtctctactaaaaatacaaaaatgagtcaggtgtggtggcacgcacctgtaatcccagctactcgggaggctgaggcgggagaatcgcttgaaccgggaaggcagatgttgcagtgagcaaagtgactggctgaaagggggtggaaaggaggaaagagagggcaggggacagtgatctaggagggagggagagagtgaaggatccgggaggtaagagaaaggccaggcaccataaagagtccactggagtaccaatcgggagaccggtcagcagggactgcaggaatgcgccaccacacccagctaattaaaaaataaaaataaaaaattgtagagacagggccttgctatgttgcccaggctgttcttgaacttctggccttgagcaatcctcctgcctttgcctcccaaaccgttgggattacaggcatgagccattttgcctggcttagagctgtttttttcttatctccccgccccccattatgttcagttgcacggggataggcaccaaggaagggaaagaggtgagtttatccagagtaagcaagagagaagggcagcaggttgctagcgtttgcaaagctgatcttggggaaagcaaggtatgtgaggcagtgggaggaaggtggacggaccaatgaactgcaggttcagctggggcggaaggactacccggagtgtggacactggagtgattataccatctcccaactttctctcaaatccaggctgcttagaggtctctgtctcaagcttgtcgcccactcagtagacagtgtgaccttttgaccaaccaaaactgattgtgtccctcctctgcttagaagcttggctctgccacctctctttggtcaacccctactcatgccccttcacatctttgttttgttttgttttgttttttcagacagtctcgctctgtcacccaggctggagtgtggtggcctgaccttggttcactgcaacctctgcctcctgggttccagccaattctcctgcctcagcctcccagacagctgggattacaggcatgcgccaccacacctggctaatttttgtatttttagtagagtagagacggggtttcaccatgttggccaggctggtctcaaactcctgacctcaggtgatccaccggccttggcctcccaaagtgctgggattacaggcataagccaccgtgcccggcttaatttttgtattttgtttttgagatggagtcttgctctgtcgcccaggctggagtgcagtggtgtgatctcggctcactataacctctgcctcctgggttcaagcgattctcctgcctcagcctcctgagtagctgggactacaggtgtgcaccaccacgcccctggctaatttttgtatttttagtagagacagggtttcaccacattggccaggatggtctcaatcccctgacctcgtgatctgcccgcctcggcctcccaaagtgctgggattatgggtgtgagacaccatgcccggcctcaatttttatatttttagtagagatggtgtttcaccatgttggccaggctggtctcaaactcctgaccccaggtgatctgcccgccttagcctcccaaagtgctgggattacaggcatgagccaccacgaccggccacccttcacgtctttgtttccagccactgcctcttggaagcctgctttgacacccccagctctgcctgattccacaatctttcccactgtgctgagttctctggagacagtgcctgcatccctccagttccctgctgtatccgcggtgcctaatgtgggacgtggcccagagctggtgctcggtatgcctgtgatattactacattaaaagcaaaaacaaacacacgaaccaaaaaaccatcctgggcgtagtggctcacatcttcaatcccagcactttgggaggctgggcagaaggatcgtttgagcccaggagtttgagaccagcctgggcaacacagcaagacccccaactctacaaaaaataaaaaatcagtctggcatcctggggcgctcctgtagtcccagctactcgggaggctgaggcgggaggatcatttgagcccaggaggtcgaggatgcaatgagctgtgattgtgccactacactcagcctgggcaacagagcaagatcccgtctcaaagcaaaacaaagcactttgcaggacagtatttgcagctcgaatcttccttatttccttgtgcataccccacaattgcagtgacatcaggaagggggtacaatgaacgtgtccctgccctcccatgactccccacgtcccccaagacttggcccgaggccgggcgtggtgactgacttctgcgatcccagcacttggggaggccgaggcgggcggatcacttgaggtcaggagttcaagagcagcctggccaacaaggagaaaccccgtctctactaacaatacaaaaaagtagctgggcatggtggtacacatctgtaatcacagctactcgcgaggctgaggcaggagaatcgcttgaacccgggaggtggaggctgccagtgaatcgagaccaagccactgcactccagcctgaaagaaaaagcgagactccgtctcaaaagaaaaaaaaaaaagactcgacccagctctgcgcgtcgcattcctgcccgaacccccacttgtcgcctcacttttgctccctggcttttgctcaagccgtgcccttgggctggaacgcctccacactgaggtggggtcatgcacgtcctgtggactcctagtctagacccaaacccagatacaacacctgaggttagagcccagccctggggtgccagccctggggtgccaggtgttcaggcacccgcgccccacgccctctggctgcgcctgcgcactgggcctcaccgcgctccttgcgttcggggaagccgtagtctggcgggaaggttggcatctgcagggggtcgggctccaccgaggcatcgcccaggtagcgccggaccaggtgggcccccatggctgcagtcgctgcagatccctgcagcagccgagggtcacctagctcctacccggaaccactgacccctcagtcagacacagcttccgggtcatttaggcagctgcggagatcatagagatgaaggactccagaggatcgctccggtccgcctggcgtcacctcgcggacaggcggaggcgggacaggtgctgtgtctcttcgcaggatatggttggacccgagaggggacttccctgagcctggaaatccatctgggcggggcagaaggggacggtgtgggactgaggcctccctcgaccctatctggggctcttctggtagcccgaggctaaagcacatattaaaattatttttcatatcattttccaaaaagttttttctttgaaaacattcaaatttctcttaaaaaaggcacgatatctattatatcgttaatgtatgtaattttgcataaagtcactttaagaattttttgtttttggagacacagtacctgtcgcccagactggagtgtattggcgcgatctcggctcactgcagcctccacctcctgggctcaaattctcttgcctcagcctcctgagtagctgggattacaggcgcccgccaccacccccagctaatttttgtatttttagtagagacggggtttcgccagttggccaggctggtctcgaacccctgacctcaagtgattcccccgcctcagcctcccaaattgctgggattacgggcatgagccacagtgcctgtccaagaaagattttgataaatttaatttaaataaaagttattcataaatacagttattattatattattattttttgagatagggtctcattctgtcgcccaggctggagcacagtggcacaatcatagctcactgcaaccttgaactcttgggctccagggatcctcccgcctcagcctctcaaagtgttgggattatgggcgtaagccactgtgcctggtcaaaaacaattatttaaagctgaaatttcaaataaattatatatatatatgcaatctttatacaattttaaaatatattaatatctaatattaatatctaatatatatttttccccagtctgacaaagcatgtattaggcatctactgtatggtatgctgggtccagtggtcagacagaaaggcagacgtggttcctgtctttcaagcttacagtctaatggaacagaaaaacagtctaatggaaaaaaaaaaatatgggccagggcagtggctcacacctgtaatctcagagctttgggaagctgagatgggaggatcgcctgaactcaggagtttgagaccagcctgggcaatatagggagactctatctctacaaaaaaaaaaaaaaaaaaaaaagctgggtgtggtggtgcacgcttgtagtcccagctactcgggaggctgaggcaggaggataacttgagcccaggagttccaggctgcagtgagccgtgatcccatcactgcactccagcctaggcaacagagtgagaccctgtctataaaaattcccaggtgatgtgatgttgctggtctagtgaccagctttgggagaattactcaactagatctttatgtgttgacatggggaagtggctgctgatatattaagtgaaaaaagcaagctattgagaatagacaactggcaatagagacttttctttttctttcttttttttttttttttttgagacagagtttcactcttgttgcccaggctggagtgcagtggtgtgatctcggctcaccgcaacctccgccttctggtttcaagcgattctcctgccttagcctcctaagtagctgggattacaggtgggtgccatcacggccagctaatttttttttttttttttttgagacggagtcttgctccgttgcccaggctggagtgcagtggcgcaatctcggctcactgcaagctccgcctcccgggttcacgccattctcctgcctcagcctgccgagtagctgggactacaagcgcccgccaccacgcccggctactttttttgtatttttagtagagacggggtttcaccgtgttagccaggatagtcttgatctcctgaccttgtgatccgcccgccttggcctcccaaataatttttttgtatttttagtagagacggagtttcatcatgttggctaggctggtcttgaactcctgacctcaggtgatccacccgcttcggcctcccaaagtgcagggattacaggcttgaaccactgcgtccagctgagaccttctttccagggctacctgtgtgacctgtccctatctccaggccaccacattaatctgtgattcttgtgcccttctagactcaagggggcagcattcacattgtgatctctatgaatggtgcttctggagttgtgccgtgcacagcctgcacagctgcatccagtaaccctgacgtgttctgggcgtgtctccttaatcttcctttctctgtgcttcagctgctcacccagaggtcagagctcaaagggagtccagagaggcaaattacagtactagctcactttccctgtgtgacccccagaagtgacttcatttctcgcagactgagtttactcatctgtaagatgaggtttgtaatacctatctcataatgttcccagccagcgagggctcccctcctcctgatggattccacccctttcctggctttatttttttattttttcaagacagggtcttgctctattacccaggctggagtgcagtgtcatgatctcggctcactgcagcctctgcctcctgggctcaggcgaccctcctgcctcagcctcccgagtagctgggattccacgtgcgtgccactacgcccagctaatatttgtatttttgtagagatgaggttttgccatgttgcccaggctgatctcaacctcttgggctcaagcaaaccacctgccttggcctcccaaagtgctgggattacaggcgtgagccatcatgctggacctttattttcctccttcgcacttagcaccatttaaactgcgatccatttgccttatttattttgtttattattggtctcttctctcaactcagctctgtgaagcagggaattttgtctgtcttgttcactgccatattactgcacctagaacagaactggcgtgcagtagatgcttagaaaatatttgttgaatagactgggtgcggtggctaacgactgtaattacacggctttgggaggcggaggcagaaggatcacttgagaacaggactttgagaccagcctgggcaatatagggagacccctgtctctacaaaaaaataaaaaaattagccgggctggtggcatgcacctgtagtcccagctacttgggaggctgaagtgggaggatcgcttgagcccaggaggttgaggctgcagtgagcaatgatcatgccactgcactccagcctggtcaacagagcaagaccctgtctctgaaaataaatacagaacaatacaataaaataaataatttgttgaataaacacaggaataaataaatagagaaggtggaagaatcagatggttgcatcaaaagtgcttagtgcctggcatccagtaggtgctcaatacatgctcactattgtttctttcatccaggtcacagtctggcgctagaaagccaaacaaaggaggctactgtgaccagtcatttcaccagaggctgaagggattcaagccagggatgactggggttgggcgtggaggcatgtggcccattccattctaaacttccaggactcaaatggttcagcctggcctagccttaccgagcactggggacctggggggaatgatactgaaagggccattgtctggggtgataactgagattcgttgtcttacagcggaggaaatcaaggacgtggacacacaaggagtgaggttaagagaggaagtttatatttatttatttatttttttgagatggagtcttgctctgtcacccaggccggagtgcagtggcacaatctcggttcactgcaaccttcacctcctgggttcaagtaattcctgtctcagcctcccaggtagctgggattacaggtgtgagtcaccctcctggcctatttacttattttttgagatggagtcttgctctgttgcccaggctggagtgtaatggcaggatctcagatcactgcaacctctgcctcctgggttcaagtgattctcgtgcctcagcctctgagtagctgagattacaggtgtgtgccaccacacctggctaattttttgtatttttagtagagatgaggtttcaccacgctggccaggacctcctgacctcaaatgacccacccgcctcggccttccaaagtgctgggattacaggcgtgagctactgcgcctggccaagagtgaaagtttaacaggtgaaagaatacctgtctctgctgcagagagaggggtcctgaacaggttgctggttttgaggtgaaatgcagggcgttttatagatgcttggtgagcaggcagtgtctgatttacatagggcttgaaagattggttgggccaggtgtgctatttgcatagggcgcaaaaactgtttaggactaggtgtgccatttgcatagggcgcgaatttctggaagtccccccaccttaatctttcattatgtaggtaggttctctgcctggcctgcaccatcatgcccgtttattttttatctatttatttattttttactgtacacgtgataataaaagggaagatggagactccatgttgaacatgcctggccctcaggtagcccttttctattggcacagctgctggcattttctcatgcaagcttccagcttgcttatctatgtttgcagctcaatttctcaggatgctcgttgttaaaaataaataatttcttgggctgttttttttgtgtgtttgtttgttttctttgagctggagttttgctcttgttgcccaggctggagtgcaatggcgcaatcttggcttgctgcagcctccgcctcccgggttcaagtgattttcctgcctcagcctcctgagtacctgggattataggcacccgctaccatgcctggctaattttttgtatttttgtgtgtgtatatatatatatatatatatatatatatatatatatatatatgtattttttttttttagtagagacggggtttcgctatgttggtcaagctggtctcgaacttctgacctcaggtgatccgcctgcctccgcctcccaaagtgttgggattacaggcgtgagccactgagcccagcctgggctgctttttgttaaaagggaagctctgacaaggactctcttaccctcactagctgcctaaataatgtctttctatctcctgtatcaatatttgggtgagggtgattttaggcagcatgtgggggcctccatcacccatcatctgtatccttcctgtttttttctttatcaaccacccaccaaggagaccttcctgtgtcccttgcccaccgctcccaggggacctgttttttttttttttttctttgagacggagtcttgctctgtcacccaggctggagtgcagtggtgagatctcggctcactgcaatctcggcctccagggttcaagcaattctcctgcctcagccccctgagtagctgggattacaggcgcccgccaccactcctggctaatttttgtatttttagtagagatgggatttcaccatgttggccaggctgatctcgaactcctgacctcaggtgatcttcccgcctcggcctcccaaagtggtgggattacaggcatgagccaccgcacctggccaggacccggtttattggccacagttccccgcctctcccctttcttccttcccttgctctcctgtcctgccccatctggtctgctccagaaggggctgcattcgcactctgtgagcagagcagcctcagagggcccacgtgggacctgaggtggggaaggaaattctgagtggtgtctgcaccttgccacagtctgctggttgggagaccagatgctctgggggattcagtttcagggaaggaggaaaaacaaggtcagtgaggcctcagcagaagactcccagggcaagccccgcttctgcttatggggcagacagaacacttgtctttaatccaggcaggagtgctactgacacccagcgtttgatgctgtgtgcattgagagtggctggctggtattggagggatgagagagcctggaggggcggggctttaggggtggccttagacagggcttggcaggcaggaggtcactcactcattcaacaaacattcattgagcacctaccgtgtggcaggcagtgaacaagacagacacaaatccctgccctcatggagttgagctgctaataggtggaagacaggcagagaacaagattaggaagtgaggtatgtgcaatgtgagatatgataagactgtgacaatggttaaggggaaaaatggcagacagagtggatgagaagggatggtctggaattttatttttattttatttttttgagacagggtctcactttgttgcccacgccagagtgcagtggcacaatcacagctcattgcagccttgaattcctgggctcaagggatcctcctacctcagcctcctgagtagctaggactataggtgtgtaccaacatgcctggttaattttttcattaatatcacagtgcgtaaaccctgtgatatgataaatatcagagggatatttcattaattttgtagaggcagggtctccctaccttacccaggctggttgttcatcatattggtcaggctgttcttgaactcccgacctcaggtaatccacctgcctcagcctcccaaagtgctgggattccaggcgtgtgtcaccatgcccagcctgatcctcctctttattgcaatcccccatgtacatgtgattcctttctccttctttctttttcttctttttctgtttctactttatttttatttttatttttttgagatggagtttctttctgtcacccaggctggagtgcagtggtgcgatcttggctcactgcaacctttgccttgcaggttcaagcgattgtcctgcctcagcctccgtggtagctgggattacaggtgcacaccaccacgcccagctcattttcgtatttttagtagggacagggcttcaccgtattggccaggccggcctcaaactcctgacctcaggtgatcccctggcttcggcctcccaaagtgctgggattacaggcatgagccactgtgcctggccatctacttctttttcttttcttgtttttagagatggggtctcactatgttgcccaggctggagtgcagtggctattcacaggcgtgaccataatgcactgcagcctcaaactcctgggctccaggactcctcccatctcagcctcctgagtagctgggactataggctcacaccactgcacctgtgtttttcttctttttctatttgtgactatctaacataacttctaatgtagttgagttatttattttattcactctctttctccctgttgctgctcccatgggtaaaattttttgttgttgttcaccagtgtatttcggttcttatgtgttagagcctaacacagagtaggtggtcagtacttatctgttgaatcaatgaatgaacaaatgaatccctgtttgacatatcaggagactaatgctcagagatgttgttctgcacccccaaggtgacacagcaagaatgggcctgagctggaagcagcctgggctcatagccttgttatttcagtgaatggggctggattccaacatctgttcctgaatacctactgtgtgccaggtcccgagggatggtattggccaggtagctatcacccctataccatgagaccacccagcctttattgtaagaaggtccccttacctctaagagtgctttttttttttttttttttttttgagacagagttttgctctgttgcccaggcttgagcacagtggtatgatcacagctcactgcatcctcaatctcctgggctcaagcgatcctcccacctcagcctcccaagtagctggatctacaggcatgcaccaccatgcccagctaattaaaaaaaattttttttttgagagaagtctcgttcttgtcccccaggcttgagtgtgatggctcgatctcggctcactgcaacctctgcctcctgggttcaaatgattctcctgcctctgcctcccaagtagctgggattaaggcgcctgccaccacgcccggctaatttttgtattttttagtagagacagggtttcaccatgtttgccaggctgatctcgaactcctgacctcaggtgatccgcccacctcagcctcccaaagtgctgggattacaggcgtgagccaccgtgcccagcctaaaaaattttgtttttctgtatagttggggtctcactttgttgtccaggatggtctcaagctcctggcctcaagagatcctcctgccttggcctgccaaagtgctgggattataggcatgaggcaccatgctcagcctaaaaagtgctcttgatgggcagatataccgtcagtctttttgacctattgacctgtccctccccctgttactattccccttctcctatcctcctatgtctgtttgcagctgctccccacccccatccatctggagcctgattagcttgtgtgtgcttagcagatgttggctgaacagacgggctctttcttccttctcagacaggtctccattttcccatctctagaatgggtacagtcacatttgccctcctacaggttggaatgggtacagtcacgtttgccctcctacaggctgggaaggctctatgacatcaggccatgtaagaggggaaagcccagcccctagagtcagctttgaatggaaagggaggttaatctgctgctgccctcctacctcaattaagaccggggctaccccattgcccacgtgcggtgcgggggaaggtttttccatttgttagaggctctcacttgcttatactgagcctgtcaggtaagaaatacattctattttgtttgagacactcttgttctgagtctcagttatggaaacccaacctaatgttccccatgggcctgatgaatgttccttgttgttgaagccaatctgagttgcatttcctcttacttttagtaaaaacctctacaaagggaaattggggtcttgccccttggggtacatattagtttcctatagtgactctaacaaattactcataaattgagtgactcggaaccacagaaataataattattattattgttactattttgagatagagtcctgctcttttgcccaggctggaatgcagtggcgagatcttggctcactgcagcctccgcctcccgggttcaagcgattcttctgccgcagccacccgagtagctggcattacaggtgcccgctatcatgtccagctattctttttttttttgtaactttagtagagatgggatttcatcatgttggccaggctggtctcgaatgcctgacctcaagtgatccacctgtctgagcctcccgaagtgttgggattacaggcgtgagccaccgcgcctggccagaaatggattatatggattattttattttatttttttgagatggagtttcactcttgttgcccaggcaggagtgcaatgatgtgatctcggctcactgcaacctctacctcccgagttcaaacgattctcctgcctcagcctcctgagtagctgggattacaggtgcgcgccaccatatctggctaattttgtatttttagtagagatgggatttcaccatgttggccaagctggtcttaaactcctgacctcacgtgatccacccacctcggcctcccaaagtgttgggattacaggtgtgagccactgcacccggccagattattttatagttctggagtcaggagaccaacatcagtctcactgctgaaacccaggtgttcatgggctgggccatgcttctttaagaggctgcagcgtgagaatccattttcttgctgtttccagcctctgcagttgcattctttagcatatggctccttcttgcatcttcaaagccagcataactttagtgaccacattgccttttttttgtgtcaaatctccttctgtttcccttctacgaggacccttgtaatgccatttttttttttttttgagacggagtctcgctctgtcacccaggctggagtgcagtggtgcgatctcggctcactgcaagctccacctcctgggttcacgccattctcctccctcagcctcccgagtagctgggaccacaggcacccgccaccacacccagctaattttttgtatttttagtggagacggagtttcactgtgtaagccaggatggtctcgatctcctgacctcgtgatctgcctgtctcggcctcccaaagtgctgggattacaggcgtgagccacgatgcctggcctgtaaagccatttaaggcccacctaggtaatccaggataaaccatccatctcaagacccttaattaattaattaatatttaatgttttttaaaaaattaatttatttatttattgagacagagtctcactctgtcactcaggctggagtgcagtggcgtgatctcggctaactgcaacctccatctcccaggttcaagcgattctcctgcctcagcctcctgagtagctgggattacaggcgcctgccactgcgcctggctaatttttgtatttttagtagagactgggtttcaccatgttggccaacctggtctcgaactcctggccttaagtgatccatccacctcagcctctaaaagtgctgggattccaggcgagagccaccacaccaggccagttgtcattattccttctgtgcgtgaatccaaactggggagaaaggctctgtgtgtatgtgtgtgtgtgtgtgtgtgtgtgtttgtgtgagcacgtgtgaggtctgagggcttcctgtcaaaatgaatttgcatgtatttgactttgaaaggaaaagggaactgagagagcccccagacgcctgagtcggagagacagggggcagaggttgccaagccctggctgccacttgtcaggttccctgtgctagacatgcataatctgtattccatcactgggtacccggacccaccaggtaaggccccggccaggctggggctggggcctaggtgtggtcaggacccagggtacagaatccccaccatggggcagctgaggcagagaccagggcttgagggatggagggaggagggaatggctgggctctgacttgcctttcccctggaagggaccatggaggaggaggaggaggatgatgactatgagaactcaacacctccctacaaggaccttcctcccaagccaggtaagaggactttttggagtgtgacctgggggaatacagggaatggggtctccagtgggcattggttgggcattgtagacacatagtcagtctcctctgtatccagcccatgccgggcactgtggaacccacaccctgcccaggacgacctgtcagtctgatggcggaggtgggtttgggcacagtcttggtgagcagggtgagagaggaggggtcaggagattggcaaaatccttgggggactgagggctcaaatagaggaagggactttggggtggggcttgagggatgagtagacatatcttaagaagagaagtccaggagagaacagttaggtgcaaagtctctgagttacaaaagctggtgcttgagaaactgggagtggactgtgggctcccagtctcctcacctttctacccaaagcccaggttttatttagacttggatctcaaacccaaggcatagcacagggttcaacaagagactgataagtggttgttaaagtggaggtttgggccagctgcagtggtgtgcgtctgtagtcttgatactttgggaggtcaaggtgggaggatcgcttgaggacaggaatttgagaccagccagggcaacatagcaagaccctatctctgccaaaaaaaaaaaaaaatagaggtttgggccgtgtgtggtggcacatgtctgtagtcccagctacttgggaggctgagtcagtaggatcacttgagcccaggagttctgggcgattgtgaactaggcgatcgggcgtctgcactaagtttggcatcaatatggtgatgttttgggagcaggggaccaccaggttgcctaaggtgtctgaggaggggtttccaggttggaaacggagcagttcgacacccccaagctgatcagtagtgcgactgctcctgtgagtagccgctgcactccagcttgggcagcatagcgcgactccacttctaaaaaaatagagaaaatgaaaccggaggtttttgaggtattcctgagtttactgccaccagggaccctgaggccatgagagatcccggaggcccaaaacagaaaatccctgagatatgctgatggcctggtcctggtgaccttagacaggagccattctgtgagggctgaggctgtatatcccccatctctgagtccaaagtggggccacctgggaggtccagaaatatggtgggacttgcctgaggtaggaggtgacctgtgctgtgttgtttcactgccccatttccaatttatggtcctaatgtgaccctcaagccctgggtctacatatatgaccaaccaatcccattcccttcttcagggccacgtctgctccaaaagcacagtcctgtccccacatccacatgcagcccagcatccactctccaatccaacttcatcaccctctctactatagcccagcctcgactccttccccattcccaaacctggcaaggactctgttcttcatcctaaccacatcatgaccttacccacatccatccctgtccccaacccattttccatcccatcccaccccatcccaacaccaattctaatccaaaccccacctcatcttcatccccatcctgaaacgcaactgtttttgttttttaaaatcccctccatccccttccatcccttctcctttcaatcaaaccctcaaagagacacacagagaagagaactgtgaattgtctgctcattagtttttatgagaggaaaccagagaatttaaaaaaaatatttttgagacagggtcttgcttgtcacccaggctgccctgaagtggtgcaatcatagctcactgcagccttgagctcctgggtccaagcaatcctcctactacaccctcccgagtagctggggttacaggcatgagtcactgtctgtaaagcctcatgtgaagctcagggtctacatatatgactcatatgactctcagggcctgtaagttctgcagagatgactgtggtagtcagccttcaagatgggttccctgtgacccttacgttctcatattcgtgcccttgtgtagtctcttcccacaatgactcagagctggtccatgtgataaatagaatactgtatagtggagaccatcctttgtgacttgtgaggctagatcataggagcatggtggcttctatctttgcctctgccatgttgtgaagatgcccagtcatccctttggagaggctcacatggcaaggaactgaggcctcccaccaacagccatgtgagtgcatcatcttggaagcagatcctctagccccagtcaagcctgcagatgacttgcagtcccaggcaacatcttgactacaatcacgcaagagatctcaagctagaactacccagctaagctgctctcagattcctgaaccacagaaactgtgagataataaatgcttatggttgttttaagtcactgcgttttggggtaattggttgtgcagccatagataactgacccagtgccctggtacttcaccatggaatgtgggggaatacttaacacctatccccttaacatcttgttacaaatgttaccacttccaggaggtacttcctgatgacctctctacattagcttttatcctatcccattgctctgttttattaggtttagagcagtaatacttagtctatataaaaacatattttaatgtttcttaatttctttactttttttttttttttttcttgagacggagtttcactcttgctgcccaggccggagtgcaatggtgcaatcttggctgacagcaacctctgcctcccgggttcaagtgattctcctgactcagcctccctggcagcgggattacaggcatgtgccactgtgcccggctaattttgtatttttagaaaagatggggtttctccatgttggtcaggctggtctcgaactcccgacctcaggtgatctgcctgccttggcctcccaaagtgctgagattacaggcacgagccaccacgcccagcctcttttctacttttttaagagtggggtctccctctgttgcccaggctggagtgtagtagtgcaatcatggctcactgctgtgtcaacctcctgagctcaagcaatcctcccacctcagcctcctgatagctgggactactggtgtgcaccaccatgcctggatggttttttctaaattttttttacagagatagggtcttgctatgttgcccaggctggtcttgaactcctggcctcaagcgatcctcctgccttggcctcccaaagtgctgggattataggcatgagccattgcgcccagcctatttctatgtctctttactggtttattgtgtctctggtctagattgaaggaagaagtttatccatctcttccacccagaacttggtgctctgtaggggagctcaactgggagcggggaggtgggtggctgttgtcattgtttcttctttttctttctttctttctttttttttttttttgagacagaatctcactctgtcactcaggctggagtgcagtggcatgatctcagctcactgcaacctccacctcctgagttcaagtgattcacctgcctcagcctcacaagtagctgggattacaggcaggcaccaccacgcccggctagtttttgtatttttggtagagacggggtttcaccacgttggttgcccaggctgatctcgaactcccaaactcaggcgacctgccagcctcagcctcccaaagtgctgggattacagacgtgagccaccacccccggcccattgtttcttctatgtgtgagtccaaactccagagaaagatgtgtgtgtgtgtgtgtgtgtgtgtgtgtttgtgtttgtgtgaggtctgggggcttccccccaagatggatttgcctgtacttgactttgaaaggaaagggaaacagacagatgccttagacatctgagtaggagagacaagacctggctaccccttgtcatgttcctggtgttagcggtagccatgcacaacctgtattctatctctgggtgtccagacccaccaggtaaggccctggccaggctggggctggggcccaggtgtggtcaagatccagggtacagaatccccatcatggggcagctgaggcagagaccagggcttgagggatggagggaggagggaatggctgggctctgacttgcctttcccctggaagggaccatggaggaggaggaggaggatgatgactatgagaactcaacacctccctacaaggaccttcctcccaagccaggtaagaggactttttggagtgtgacctgggggaatacagggaacggggtctccagtgggcattggttgggcattgtagacacacagtcagtctcctctctacacagcccatgccgggcactgtggaacccacaccctgcccaggaggacctgtcagtctgatggcagaggcaggattgggcacagtcttggtgagcagggtgagagaggaggggtcaggagattggcaaaatccttgggggactgagggctcaaatagaggaagggactttggggtgagacttgagggatgagtagacatttcttaagaagagaagtccaggagagaactgttaggtgcaaagtccctgagttacaaaagctggtgcttgagaaactgggagtggactgtgggctcccaatctcctcacctttctacccaaagcccaggttttatttagacttggatcacaaacccaaggcatggtacagggtccaacaggagactgataagtggttgttaaagtggaggtttgggccagctgcagtggtgtgcatctgtagtcttgatactttgggaggccgaggtgggaggatcgcttgaggacaggagtttgagaccagccggggcaacatagcaagaccccatctctgccaaaaaaaaaaaaaaaacaagtagaggtttggaccgtttgtggtggcacatgtctgtagtcccagctacttgggaggctgagtcaggaggatcgcttgagcccaggagttctgggctattgtgaagtatgtgattgggcatctgcactaagtttggcatcaatatggtgatgttttgggagcagggaccaccaggttgcctaaggtgtctgaggaggggtttccaggttggaaacagagccactcgacacccccgagctgatcagtagtgcgactgctcctgtgagtagccgctgcactccagcttgggcagcatagcgcgaccccacttctaaaaaaatagagaaaatgaaaccggaggtttttgaggtattcctgagtttactgccaccagggaccctgaggccatgagagatcctgggggcccaaaacagaaaatccctgagatatgctgatggcctggtcctggtgaccttagacaggggccattctatgagggctgaggctgtatatcccccatctctgagtccagagtggggccacctgggaggtccagaaatatggtgggacttgcctgaggtaggaggtgacctgtgctgtgttgtttcactgccccatttccaatttatggtcctaatgtgaccctcaagccctgggtctacatatatgaccaaccaatcccattcccttcttcagggccacgtctgctccaaaagcacagtcctgtccccacatccacatgcagcccagcatccactctccaatccaacttcatcaccctctctactatagcccagcctcgactccttcccccttcccaaacctggcaaggactctgttcttcatcctaaccacatcatgaccttacccacatccatccctgtccccaacccattttccatcccatcccaccccatcccaacaccaattctaatccaaacctcacctcatcttcatccccatcctgaaacgcaactgtttttgttttttaaaatcccctccatccccttccatcccttcccctttcaatcaaaccctcaaagagacacacagagaagagaactgtgaattgtctgctcattagtttttatgagaggaaaccagagaatttaaaaaaaatatttttgagacagggtcttgcttgtcacccaggctgccctgaagtggtgcaatcatagctcactgcagccttgagctcttgggtccaagcaatcctcctactacaccctcccgagtagctggggttacaggcatgagtcactgtctgtaaagcctcacatgtgaagctcagggtctacatatatgactcatatgactctcagggcctgtaagttctgcagagatgactgtggtagtcagccttcaagatgggttccctgtgacctttacgttctcatattcgtgcccttgtgtagtctcttcccacaacgactcagagctggtccatgtgataaatagaatactgtatagtggagaccatcctttgtgacttgtgaggctagatcataggagcatggtggcttctatctttgcctctgccatgttgtgaagatgcccagtcatccctttggagaggctcacatggcaaggaactgaggcctcccaccaacagccatgtgagtgcatcatcttggaagcagatcctctagccccagtcaagcctgcagatgacttgcagtcccaggcaacatcttgactacaatcacgcaagagatctcaagctagaactacccagctaagctgctctcagattcctgaaccacagaaactgtgagataataaatgcttatggttgttttaagtcactgcgttttggggtaattggttgtgcagccatagataactgacccagtgccctggtacttcaccatggaatgtgggggaatacttaacacctatccccttaacatcttgttacaaatgttaccacttccaggaggcacttcctgatgacctcgctacattagcttttatcctatccctattgctctgttttattaggtttagagcagtaatacttagtctatataaaaacatattttaatgtttcttaatttctttacttttttttttttttttcttgagacggagtttcactcttgctgcccaggccggagtgcaatggtgcaatcttggctgacagcaacctctgcctcccgggttcaagtgattctcctgactcagtctccctggcagcgggattacaggcatgtgccaccgtgcccggctaattttgtatttttagaaaagatggggttcctccatgttgctcaggctggtctcgaactcccgacctcaggtgatctgcctgcctcagcctcccaaagtgctgagattacaggcgtgagccaccatgcccagcctcttttcttttttctttaagagtggggtctccttctgttgcccaggctggagtgtggtagtgcaatcatggctcactgctgtgtcaacctcctgagctcaagcaatcctcccacctcagtctcccgatagctgggactacaggtgtgcaccaccatgcctggatggttttttctaattttttttttttttttacagagatagggtcttgctatgttgcccaggctggtcttgaactcctggcctcaagcgatcctcctgccttggcctcccaaagtgctgggattataggcatgagccactgcgcccagcctatttctgcgtctctttactggtttattgtctctctggtctagattgcaggaagaagtttatccatctcttccacccaggacttggtgctctgtaggggagctcaactgggagaggggaggggtgtggctgttgtcatagtttcttctttttccttttcttctttttttttttttgagacagagttttgctctgtcgcccaggctggagtgcagtggcgcgatctcggctcactgcaagctccgcctcccaggttcacgccattctcctgcctcagcctcctgagtagctgggaccacaggcgcccgccaccacgcctggctaattttttgtatttttagtagagacagggtttcaccatgttagccaggatagtctcgatctcctgaccttgtgatctgactgcctcagtctcccaaagtgctgggattacaggcgtgagccaccgcgcctggcccttttttttgagacagaatctcactgtgttgcccaggctggagtgcagtggcgctatctcggctcactgcaatgggggctattgtcattgtttctccttcctctttttttttttttttgagacagaatctcactctgtcactcaggttggagtgcagtggtgcgatctcagctcactgcaacctccacctcctgagttcaagtgattcacctgcctcagcctcacaagtagctgggattacaggcttgcaccatcatgcctggctagtttttgtatttttgttagagacggggtttcgccatgttggttgcccaggctgatctcgaactcccaaactcaggcaacctgccagcctcagcctcccaaagtgctgggattacagatgtgagccaccactcccggcccattgtttcttccgtgtgtgaatccaaactccggagaaaaatgtgtgtgtgtgtgtgtgtgtgtgtgtgtgtgtgtgtttgtgtgaggtccaggggcttccccccaagatggatttgcctgtacttgactttgaaaggaaagggaaacagacagatgccttagacatctgagtaggagggacaagacctggctaccacttgtcatgttcctggtgttagctgtagccatgcacaacatgtatactatcgctgggtgtccagacccaccaggtaaggccctggccaggctggggctggggcccaggtgtggtcaagatccagggtacagaatccccatcatggggcagctgaggcagagaccagggcttgagggatggagggaggagggaatggctgggctctgacttgcctttcccctggaagggaccatggaggaggaggaggaggatgatgactatgagaactcaacacctccctacaaggaccttcctcccaagccaggtaagaggactttttggagtgtgacctgggggaatacagggaacagggtttccaggaggcattggctgggcattgtagacacacagtcagtctcctctgtatccagcccatgccaggcactgtgcaacacacaccctgcccaggaggacctgtcagtctgatggcagaggcgggtttggacacagccttggtgagcagggttgagagaggaagggtcaggagattggcaaaatccttgggggactgagagctcaattagaggaagggactttggagtgggacttgagggatgagtagacatttctttctttttttctttttttttgagatggaatttcactctgtcacccaggctggagttcagtggcacaatctccgctcactgcaacctcgcctcctgggttcaagcaattcttttgcctcagcctcccgattagctgggattgcaggcgcctgctaccatgcctggttaacttttgtatttttagtagagaccagggtttcaccatattggccaggatggtctcaaactcctggcctcaagtgatccgcctgccttggcatcccaaagtgctgggattacaggtgtgagccaccacgcctggccgagcagacatttcttaagtagagaagcacaggagagaattgttggctgcaaagtccccgagtcataaaagctggtgcttgagaaactgggagtggcctgtgggctcctcaatctcctctcattaccactcaaagcccagggctttatttaatcttgaatctcaataaacccaaggcatagcccagggttcaacaagaatctgatcagaggatataaaagtggaggtttgggctggttgcagtggtgtgtgtctgtagtcccactgctttgggaggccaagatgggaggatcacttagccatgagttcactggaggccaggagttcgagaccagcttgggcaatatatagcaagacgcccatctctaccaaaaaaaaaaaaaaaaaaaaagggaagtttgggccaggcgtggtggctcatgcttgtaattctagcactttgggaagccaaggtgggagcatcactggagccccagaaaagagaccatcctgggtaacacagtgaaacccccagctatatgaaaacattttttttttcaaattaaaaaaattagccagttgtgggatgtgtgcctgttgtcccagcttctcaggaggccgaggtggtaggattgctagaacccgggagttcaagggtgcagtgagctatgatggcaccactgcactccagtctggatgacagagcaaggcactgtctttaaaaaaatagaacacgggctgggtgcggtggctcacgcctgtaatcccagcactttgggaggctgaggcgggtggatcacgaggtcaggagattgagaccatcctagctaacacggtgaaaccccgtctctattaaaaaaatacaaaaaattagctgggtgtggtggtgggcacctgtagtcccagctacttgggagactgaggcaggagaatggcgtgaacctgggaggcggaggttgcagtgagccaagatcgcgccactgaactccagcctgggagacagagagagactctgtctcataaaacaaacaaacaaacaaacaaacaaacaaaaacatggccgggcacggtggctcagccctgtaatcccagcactttgggaggccaaggcgggtggatcacttgaggtcaggagttcgagaccagcctggccaacatggtggaatcctgtctctactaaaaatataaaagttagctgggcgtggtagcatacgcctgtaatcccagctgagggggctgaggcagaattgcttgaacccagggggcggaggtttcagtgagatgagatcacgccactgcactccagtctgagcaacagagcaagactctgtctcaaaaaatataaaataaaataaaaaataaaataaaatagggagatacccaggcaatctaggttcgttggtcaccctacttaatcccatctccatccctaatcccaattgcattcttacgtccaaccccgtctgtaacctaatctccaatcctccactgcaatcctaaccctgtttccatcacttcctcttggcgcattcccatcctcagcccagccctcaccctgagcttctcttctccaggttcaagtgctccaccaagacctccaagggcaggtgagttggggctgggggtgtaggagacccagagctggctttgccctgctctggccctgaccaaccattcctccctcctcagcaaaggaaacagagaaacccccacttccttgcaagccccggaacatgacaggtgagagctgacagttggagtcttcctgctcacctggctgaagcccttcttgaaatgactttctcatctcttctaggcctggacctcgccgctgtcacctgtccacctcctcaactgggtgagcagtgggaagaccctttaagatgcctaagaggggatacctggatgtttcctttcaatcccccaatttttatttatttattttttttgagacagagtctcactgtcatccaggctggagtgcagtggtgcgatactggctcactgcaacctctgcctcctgggttcaagtgattctcctgcttcagcctcctgagtagctgggactacaggcacgaaccaccacacctggctaagttttgtatttttaatagagatggggttttgccatgttggccaggctggtctcaaactcctgacctcaggtgatccacccgcctcagcctccgacagtgctggaattacaggcgtgagccactgcccacagccagccccctaaattctgaccagagaacaaaacagaggttgttgatcttggaagacagagtctttggcatcttctgaataaacctctctccccctttctcccagctgtgaatcttgagccttctccattgcagccatccctggccggtaagtgtcctcccatttcccctctgacagtggctagtgtatctgattgagacctatggctctacagtgagaccctgagtcagaggaacttctcctttaagaagctgctccttcaggacctgctgcactgttctgagttagtctagtgagcgctgctctaagtgagaaagccattccttgacatcagagtttgcaaacgtgtattcttttttgtccttctgaggaccagagttatgtggttgttttgtttttgataatgatgatgtacttatggttctgttggtgattgtgatggaaggatgaggaaggagatgatggaaaggaagaggatggttggtggtagtaacgatggtagaggtagtgatggcgttgttgtgtgctgatggtgatggtggagatactgatgatggtggtgatggtggagatagtgatggtgttgttggtattgatgatggtaatgatggtggaaacagtgatatggtggtaatgcagggcggaggtagtgatggtattgttggtgatggtggtggtggtgatgatgaaggtagtgatggtgttagtgagatggtgatgatgatagtggtggtagtgatggtgttggtggtgatggtgttggtgatgatagtagaggcagtgatggtattgttgacaatgacaatgttgttggtagagatgatggtggtgatggtggaggtagtgatggtgttggtgatgaccatgtttaaaaagaaaaagaagcttctcctctctgagtctaggccagatctccagaaactcaggtatctgcttgcataagatatgggaaatgttctctgctctagaagccggggtccacaagcttccttgacctaggagcaacttggtcaggggtttctggagagtagaagatgatgcatcatagatattaagaacaaagctgtgtccaagtcatgcctaacctcaccaagcctcagtttactcacttgcaaaatgggaataatgcttataacctacatcataaggatgagactccaataagataggaaggatgtaggttgggtacagtggcttacgcctgtaatcccagcactttgggaggctgaagcagggaggatctcttgatgccaggagttcaagaccatcctggacaacatggcgagacccccatctctgcaaaaaaataaaataaattagctgggcctagtggcacacatctatagacccagctacttgaaagggtgaggtgggaggattgcttgagcccaggcattagaggttgcagtgagctataactgtgccactgccctccagcctggatgacagagtgaaaccttgtttcaagaaggaaagaaggaaaaagagaaggatgcaacatgatgcttagcgcaccgtaaatgcatcaaaaagaccctgagcctccccagggttcactctccctaaccctctcttgctgacttcatctgctgaaacagtcatgactacagacttctgccccctgctcttggacaaagacttaagagtctcttccttactctctgaagccccagtatcagtctctctgttcccatccccactccccagcaactccagtcccctggctcaatcagaggtctggaggtcctggctgctgccagaagaggtggatggtgtacctgtgtctgctggtggtgacttccctgttcctgggctgccttggtctcactgtgaccctgattaagtgtgagtagggccaggaagggacatggggagagattggggagggtgcacaggaggacctgggctcaatttggactcttcttcatagaccaggagttgatggaagaactgagaatgttaagctttcagcagatgacgtggcgaacaaatagtgagtgctttcagtcattccttcatgccactcctattgagccctaacccaatcctcagatccaactccaagatccaacctcatccccatctttgctgggcactgtgctaggtaccagggggttaaaatggtaaacatgtcagacacagtctttgtctgactgtgtgaagtgtgcatgtgtatatgtgtccagacctccaccatccaatatggtggccacaagccatatgtggctgttgaacacttgaaatgtggccagtccaaactgagatgagcactaagtatgaaatacacactggtccaggtgcagtggcacatgcctgtaatcccagcacttttggaggctgaggcaggattgcttgaggccagaagttcgagacccgactgggcaacacagcaaggctccatctctaaaaaaaattagccgggtgtggtggtgtgtggtgtgtgcttgtcatcccaactactcaagaggccgaagtgggaggatctcctgaatcagggagtttgaggttgatcatgagccatgatcacactcaagagatcctcctgcctcagcctcttgagtagctgggacataggcgcatgccatcacacccggctggttaaaaaattttttttttgtatagaagaggtctcactatgttgactaagctcgtttcaaactcctggcctcaggtattcctcctgccgcagcctcctgaagtgtttcgtgcctggcctaaaacctgtgtttctgttttgtccaactgaagggccagctactgagctagcgagtgttgaaaaagggaagagttcgtgggggagtagtgataatacacacgttaattatagaagaatcttttgacctgggttggccttcatcatgactgccaaagtctgaatatttctccattccacactgcctcaccctatgcttcataacaagcaagctcaaaacccatcaatggcttctcattgtccagagtccaaggtgaaacctttagcttggcattcaaggatccacatattaggctgggcacagtggctcatgtctgtaatcctagcactttgggtggccaaggtgggaggatcccttgaggccaggagttcaagaccagcctgggcacagcaagactttctttcgtttgtttgttctttctttctctctctctctctctctctcactatctctttctttctttctttctttttctttttccttcctttcttccttccttccttcccttcccttctccttccttccttccttcctttcttctctccctctttctccttccttccttctttccttccttcttactttctttctctcttgctttctttcttttgacagaattttgctcttgttgcccaggccggagtacagtggcgcgatctcagctcactgcaacctccccctcccaggttcaagtgattgtcctgcctcagcctcctgaatagctcagattacaggcatctgccaccactcccggctaattttttgtatttttagtagagatggggtttcaccctgttggccaggctggtctcgaactcctgacctcaggtgacccatctgcgtcagcctcccaaagttctgggattatgggcatgagccactgcgcccggcctagcaagaccttgtttctacaacaaattttaaaaaaatagccagtcatgatgtcatgtacctgtagtcccagctactcaggaggctgaggtgggaggatcacttgagcccaggaggttgaagctgcagtgaaccacgattgcactccagcctgtgggacagagcaggactgtgtctaaaaaaaataaaataaaggatccaggcatctgagctcattctgctttgatctcaagcttttctgagttttccctccactcttataggctttgccgcctcaccacaacatacttgcctctgtatctttgcttttttttttttttttttttttttttgagatgaagtctcactctcttgcccaggctggagcacagtggtgtgatcttggctcactgcaacctctgccttccgggttcaagtgattctcctgcctcagcctcctgagtagctgggattacaggcatgtaccaccacgcccaactaatttttgtatttttagtagagacagggttttaccatgttggccaggctggtcttgaactcttgacctcagatgatccgcccacctcggcctcccaaagtgctgggattacaggtgtgagccaccatgggcagcctgcatctttgcttttaagatagtccctgcctaatgtgcctcttcctcacctcacagttatcgaatcactttcttcctttaaaacccacttctttcagggtgcccaccacccctacttttccccacatccccgggattgatccctcctctgagccattctcggattctgagcactgtacatgtggtttttgagcgcaagcgtgacccactggaatgtggacacagtggggaacacaacccttgcttctctctctgatgtgtctgcagtccgtggtggatgggtaggatgggttctcagtctgtagccctcaagcccatcccttctgacagtgactggcatggcagggctagctggcctgaagcatgacattgcccgtgtaagagctgacaccaaccagtccctggtggaactttggggcttattaggtaagtgagacttggggaattgcccagggatggggggcatggcagagctggcacattacatcactccattgaagtcattctcagtgcagtctatgtgaatggtgcccctccccctcaccggagttgagcagtgtacagcctgcacaactgtacatggcatactatgtacatggctcaggttctggggccatcctgacagcattctgtctggttcccagactgccgccgaattacctgtcctgaaggctggctgccctttgagggcaagtgttactacttctccccaagcaccaagtcatgggatgaggcccggatgttctgccaggagaattactctcacttggtcatcatcaatagctttgctgagcacgtgagttcttcccactgaacctttgagaaccttcagggacagcctgcttctcttccaggatgcacacatccctcccttccctggatggcaagaaattagaattacttttcagttactaaaactttaacagcaagctcttcctaaggtagtatcatgcagaggttaagaagacatgctttgtttttgagttcaaattctggttgtgttgatttaacctctgtacatttcaagtatcggttttatctctaacatgaaaatacaataattaatatctgttaggtagcactttttatgtttcaggttgcattccaaatactttacatcttacagtcattaacacatgcaatcctcacgacaacctatacattagtatgccagtcggaagagtttatttcttttcttttcttttttttttttgagatggagtctcgctctttcacccaggctggagtgcagtggctggatcttggctcactgtaagctccgcctcccgggttcacgccattctcctgcctcagcctcctgagtagctgggactacaggtgcccaccaccacgcccggctaattttgtttttgtatttttagtagagacagggtttcactgtgttagccaggatggatggtcttgatctcctgacctcgtgatctgcccgcctcggcctcccaaagtgctgggattacaggcgtgagccaccacgctcggccttctttttttttttttttttttttttttttttgagatggagtctcactctgtcacccaggctggagtgcagtggtgcaatcttggctcactgcaacctctgcctcccgggttcaagcaattctagtgcctcagtctcccgagtagctgggattgcaggcatgtgccaccacgcctggctaacttttgtattattagtagagatgaggtttctccatgttggccaggctgttctcgaactcctgacttcaggtgatcctcccacctctgcctcccaaagtgcggggattataggtgtgagccaccacgctgggctaggaggggttactttatgctgcggtaacagacagtctccatagtccaatggtgaaagtagacgagggaaatcatacattgactgtcagagtttccatttacttttgctcacaaaagtcacatgtacacgcctatcttttaaggtggtagggaaataagtctcacctccgtgcaaccagaaggaggattggaatatgggtaaatagctttaatgatttgctactacaatttaggtagtattactatttgtacacaatatgtatcatctgtacttcacaggtgaggaagtcaaggttccagtacatgtaagcaacttgcctggagtcacttacagctagtgggatttaagcctaggtagccggctttcaagtccatggtcttgaccatagacataggactatagtatggtttatgtttccttttttctgtttttcagggacaaggtctcactctgtcactcaagctggagtgcagtggtataatcatagctcgttgcagcctcaaagtcctaggctcaagcaattctttcgcctcaccctcctgagtagctaggacaaccaggcacttgccactgtacccagcaaattattattattattattactttttgagatggagtctcgctctgtcacccaggctggagtgcagtggcgcgatctcggctcactgcaagctctgactcccgggttcacgccattttcccacttcagcctcccgagtagctgggactacaggcgcccgccaccacacccagctaattttttgtatttttagtagagacggggtttcactgtgttagccaggatggtctcgatctcctgacctggtgatctgcctgcctcggcctcccaaagtgctgggattacaggcatgagccaccgcgcctggcccagcaaattatttttacttttgtagagacagggtcttgctatgttgcctaggctctatgttttctattcattttatttttaatttatttatgtcattatatttaaaatgttttttttttcccagacagtatatagttgggtttggatttttaaaatctgatctgataatctctggcttttaattggtgttttcatttacttatttatgtatttttggagacagggtctcactttgtcacccaggctggagtgcagtggcgcagcctcagctcatggcagccttggcctcctgggctcaagtgattatcccacctcagctccccaccaagtagctgggacaacaggtgtgtgccaccatgcctggataatttttaacattttttgtagagatgaggttttgctatgttgcccaggctggtctggaactcctgacctcaagtgatctgccgccttcacctcccaaagtgctgggattacaggcatgagccactgtacccagcctaattggtatttttagaccgtttacatttaatataattactgattgggttggatttaggtctatcatcttattattttcctgtatgtcgtgtcccttctgttttttatccctctgtttcatagcattatttgtatgagtagttaaacagttttttttttttgagatggagtcttgctgtgttgcccaggctggagtgcagcagcatgatcttggctcactgcaacctctgcctcccgagttcaagtgattctcccgcctcaacctcccgagtagctgggattacaggcgcccaccaccatgcctggctaattttgtacttttggtagagatggggtttctccatgttggccagattggtctcgaactcctgacctcaggtgatccacctgccttggcctcccaaagtactgggattacaggcataagccaccgtggctggccaaaacagggcttttgaaggagttaaattaggtaatgtaaatgaggcaggtgcaaatcatattccctaactcagtttcacaagaaatacaactacatttcctttaaattactcattttagtttctctcttgagttctcattctgctagaatggtgtacatttactctcagtcaattgggttctcccattttacttctaaatggggacagcttttgtggggtcaaggtggaagggagcacacatcgggtctttgctgtctttactccaaactggtatctactgggacatctacagactgaatgatcctgggaaggttacttaacccctctgtgcctcagttttctcatctacaaaatgggcataatgataatacttgcttcagtgagtcatgataaggatccaatgagacaatctgtgcaaagtagtatagctcactttttttttgagatgggatcttgctctgttgcccaggctggagtgcagtggcatgatcttggctcactgcagcctccatctcccaggttcaggcaatcctcctgatttagcctcccaagtaactgggactatagtcacgtgccaccactcccagctaagttttgtatttttttttttagtagagttagggtatcatcatgttggccaggctgctctctagctaatgatctcaagtgatctgctccccttgacctcccgaagtgccgggattacaggagtgagccaccgtgccctaacccatagctcacttcttaattcattaattcaaccaacatttcctgagcacctactatgtgctggagactattctacatattggggatccagtgatgaccaagacatatgagttccctcttcttaaactgctctgattttggtgcctagaaatagcaaggactctctaaatgttaaagagtcttctggttttctggggctcagactttgggccatctaggctgcccctgaggcatcccactcttccatcagcaaagccttttgggcctggaggtcttttcctgctgttcttgggcacaagagatctttctgctcctcctatcccattctggggtctaagacactgtgaggccttctaagcctccatctagtctgatgggacaggaagacctttccgctctctgattttctgacacctccctggggctttacccaggaaatagtccccaggtcccttctgctttttagagtctccaaacccatctggggtttttaccatcacctgaaaagctcaccggaaatgagataccagattcttctctctggggcctgccatgtctacacatttattatttccttcccatggtgactttacctccccacatttttttttccatcaaagcagaaattttattacccacattctttgaccacaatgctataacgacagaaatattttcttttacaaaaatttcaatcaccttaagaatgtttaaagtcggccggctgcagtggctcgactgtaatcccagcactttgcgaggccgaggtgggcagatcacctgaggtcaggagtttgagaccagcctggccaacatggtgaaaccctgtttctactaaaaatacaaaaatgagctgggcatggtggcgcgtggctgtaatcccagctactcaggaggctgaggcaggaaaatcgcttgaacctgcgaggcggagggtgcagtgagctgggatcacaccactgcattccagtctgggagacaaagcaagactctgactcaaaaaaaaaattttttttttaaagtcaccagataactttggattaaagaagaaatcaaaactgcaaataaataaaagcaaacatcaattggcattgcctatagtagaacacatgaaatagattatagtaaaaaattcttaaaacacaaagaattccaggatgtggaaagctggggcgagtgttactcacacccaaacagcaacaatagccagaataactacaaaatcataactttttctaaactcattagctaactgagatcacctggcagtcaaaaagtctaaaatgggctgggcatggtggctcacgcctgtaatcccagcactttgacctccccacatttttttttttgagacgggatttcgctttttgttgcccaggctggagtgcactgtcgcgatctcagctcactgcaacctccacctcctggtttcaagcaattctcctctctcagcctcccgagtagctgggaatacaggcatgacaccacgcctggctaatttttgtatttttagtagagatggggttttgccacgttggccaagctggtctcgaactcctgacctcaggtgatccacctgtgttggcctcccaaagtgctgggattacaggcatgagccaccgcgcccggccacctccccacattttaaggaatcttggtttggtggtaagttgggtgagttagatgtgatttgcatatagtaaaatgcacagatctttgatgtatgttcagtgaactttgacaaatgcgtacacctgtgtaactgtcaaactaaccaatatttataatctttccaccaccctagaaagttttttcatatcctttttctagttaatccctccctgccccctacttgcaaccaccagtctaatttctttcaccatcaatttgtttggagaggagttgcttctaactatattttcttccctatcttttatctctgtcataagtcctttcttttcttccaaagacctgggattttgacttttttccgggacagaggcttgctctgctgcccaggctggagtgcagtggtgcattcatagctcactgcagccttgaactcctgggcttaagggatcctcccacctcagcctcctgagtagctgggactatagacacgcaccaccacgtctggctaatttttaaaaatttttgtagatatggggtctcagtatgttgcccagactaatctcgaactcctagtctcaagcgatcctccctccttggctaaagtggtgggattacagatatgaggcagcgtgtcaaaagcctgggcttttgaaataccaaagctaggaaacctacttttcatcttccttccttcttttcctggaacaatgaattcttatgttgtttggatgcagattaaggctaccgagtagcacaaaagtgcaagagaaaccaaaaaaaatcagttactattgctaaaaatgtcacttaaatgttataatgctacctactaagacgtccacagtatgaggctctgcacagtggctcatgcctgtaatcctagatctttgggagacttacagtgacctttgggacatgcagtgagccatgatcacaccactgcactccagtctggttgacagagtgagaccctgtctcaaaaaaaaaaaaaaaaaaattaggctggatgtggtagctcatgcctgtaattccagcactttgggaggctgaggcaggtgaatcaactgaggtcagaagtttgagatcaggctggtcaacatggcgaaagcccgtttctactaaaaaatacaaaaattagccgggcgtggtggcgggtagctataatcccagctactcgggaggttgaggcgggagaatcgcttgaacccaggaggtggaagctgcagtgagctgagatcgcaccacagcactccagcctgggtgacagagcgagactccctctcaaaaaaaaaaaaaaaaaagttaatcctcacaacactaccaggaggtagctactgtgaacccattttacaggtgaggaaactgaggcacggagcagttcgcagattgcatgagaaaaagtagcacgattattcccaccacacatgctacagtgggaggaagacattgatcctgttctgcataccatggggacggggacgggttgtgggaggtgacgttcccaagccctaaatatgtaggacagggcacagggcaggtcctcaccctgagggtcatgtagaggaatggctggctgaatggaatttttatttgcagaattttgtggccaaggcccatggctctccacgggtgtactggctggggctgaatgacagggcccaggaaggggactggaggtggctggatgggtctcctgtgacattaaggcaagtgcttgggtttcctggggtctctctgcttcctctgtgggccctgaccatggggaggggagaaggtgatggagtacatggttgaaggagtcaggagctgtttctttttttttttttgagacagagtcttgctctgtcgcccaggctggagtgcagtggcgcaatctcagctcactgcaagctccgcctcccaggttcaaggtattctctgcctcagcctcccgagtggctgggactacaggtgcccatcaccatgcccggctaattttttgtatttttagtagagacggggtttcaccgtgttagccaggatggtcttgatctcctgacctcgtgatctgcccgccttggcctcccaaagtgctgggattacaggcgtgagccaccgcgcccggccaggagctggtttttactggtacagctctacttgttttattttattttattatttatttatttatttatttatttatttatttatttattctttgagacggagtctcgctgtcgctcaggctggagtgcaatggtgcgatctcagctcactgtaatctctgtctcccaggtagaggttgattcttccaccttagtctcccaagtagctgggattacagacacccgccgtcgtgcctggctaatttttgtaattttgtagagatggggtttcaccatgttggccaggctggtcttgaactcctgacctcaggtgatctgcccaccttggcctcccaaagtgttgggattacaggggtgagccactgcgcccaaccttattttagttttttgagacagtctcgccctgtcacccaggctggagtgcagtggtgcaatctcggctcactgcagcctcaacctcccaggctctggtaatcctcctgcctcagcctcccgagtacctgggaccacagtcacacaccaccatgcctggctaattttttgtatttttagtagagatggggttttagtgtgttgcccaggctggttttgaacttctgagctcaagcgatccacccgccttagcctcccaaagtgctgggatgacaggcttgagccaccacacctggcctctactaattttaaacacagaaaaattcctgtcctgtttggtaaattgccattgccttaaatctcctgagaatccttctgctgccccttggacttccacatcacctaacaactaaaggatttgtcattggcaaagaaggggcctagagaccctgattgcagggtgtgtggcacaggtagcattgctcattattttggtacaccacccccagtcattcccatttccctgtgtgcttggcatccttgcagtccaagctgatagggtgtctagcatcccaggcttggccagacagggacagcaccagggtgattttttggtgacaggctgtctggaccctgaaccttcaatatttcctccattgcaacatctcagtcttttcgtaaaactgctgaaatatatcaagctctccaggctaatggttgggagaaaaaagggagggtggaaggatgaggaagaatttttttttttttttttttttttgagacagagtctcactctgttgcccaggctgaagtgcagtggtgcagtcttgacccaatgcaacctctgcctcccaggctcaagtgattctcccacctcagactattgagtagctgggattacaggtgcgcaccaccatgcctggctaatttttttttttttttttgagacggagtctcactctgtggcccgagctgtagtgcagtggcacaatcttggctcactgcaacttctgcctcctggattcaagcgattctcctgccttagtctcccaagtagctgggattacaggcgcccgccaccatgcttggttaatttttgtagttttagtagagacggggtttcaacatgttggccaggctggtctcgaaatcctgacctcaggtgatctacccgtcttggcctcccaaagtgctgggattacaggtgtgtgccaccgcacctggcggaacattggctgctaaaggctcacaggaatgctttttccgcaaagctattctcagctgaatgggagcctgctcacctaagacactacccaactccactggggtcagctcacaaccggtgacagcctaagagaagcctggaccccttgtgacaagttgggatgactctggtgctgttgacatcccagtggtctctgttggggtcaggctgaggctagagtcatctgagtccatgctcctgctcaattccttccccttctccatctagcttccctcacctctctcctaagaacatcctttaataaatcctacacactcgagtccctgaatcaggccctgctttaagcaagagcccacatgatctaaacaattcctagaaggttgggttgggaggttgtaaaagaaagagtccttggaagacaagacagaaactgaccagattcagaaattgattaaggggccaggcacggtggctcgtgcctgtaatcctagcactttgggaggctgaggcgggcggatcacttgaggtcaggagttcaagaccagcctggccaacatggtgaaaccccgtctctactaaaaatataaaaactagccgggtgtggtggtggacacctgtaatcccagctacttgggaggctgaggcaggagaattgcttgaacccaggagacagaggttgcagtgagccgagatcacgccactgcactccagcctcagcgacagagtgagactctgtctccaaaacaaaacaaaacaaaacaaaaaaccccccaaaaccagaaattgattaagggccaggcacggtggctcactgtgcccggcttacaggtgtaaggctccacacacggcctaatatgggttttgccaaatgcgtagtgccaggtattcatcattacagtattatacagaagagtttcaccaccctaaagatccctgtccctctgcccactttttcctccatccagcttctgggagccagaggaacccaataacatccacgatgaggactgtgctaccatgaacaaaggtggcacctggaatgatctctcttgctacaaaactacgtattggatttgtgagcggaaatgttcctgttgaagcccagggccgaggctgggggtccatatctgagtgtctctttgagatgagaatctcctgccctttcgtggacggccttgcctcttcgtgagtggacacacagatgtgcctcaaacaggattggcaccctggatgcagcaagttcccaggggtgcaagtcaggctgtttctagagtgaggacttgggcttgccctagtagatggtgagctgggaggatgctcagagcttggtggtgggaggtctcccacttctggggttgaaaggatcttcactaagttcctgatcatgactcttgggaagtgatactagccctgaggaccctggggctggtgttgaacctgggatgaaatatcctggcgcctgtgaaccacaaagagctgggactgggctccttttcctgcagcctcaaacttctgggctcaggtgatcctcccatctcagcctcctgagtagctgggactacacatgcgcaccaccatgcctggccaattttttgtagcatttaaagagagggagtctcactatgttgcccaggccagtctcaaactccttgcctcaatggatcctcctacttgggcttcccaaattgtgaggattacaggtgtgagccactgtgcctggctcaaaattattattattatttttatagagatgaggtctcactctgttgccgaggctggtctcaaactcctggggtcaagcaatccttccgtgatggcctcccaaagtgctgggattacaggcatgtgtcaccgtacctggccgatatttttatttttatttttactttccccatcttttccttttttttttttttccaaacaaaagctttgaaagtggtgacagaaaaatttccctttgagctagacctctagatctgcctcgcacagaaatacattaagtgggctggtctcatgtagtccccacatcattgcaaattacaaacctaaaaatacagaacatcagcggagaagacaggagagcttctatattcaccccatgtcgtcctctccagacactgcttccttcctggtctcaaacagcacaaataacccagaaaccatcaaaattatttttgaccagcaactttctcaatgtcttgggtgaggtttgcacaagctaagtggcagaatcagacttttgccagaagacttggcccgtggaacttctatccttttttttttttttttttttttttgagatagggtttcattctactacccaggctggagtgcagtggcacaatcatagcttactgcaccctctgcctcctgggctcgagtgatcctcctgcctcagcctcccaagtagctgggactacaggcgttcaccctcacacctggctggcccatggaacttctagaaaggcataccagctgaaaagcaagacccctacatagtgtggccaggcaggccataacctggtcatatccacacaggacaacgatggacctatctgccagcacgtgcccttgagctatctgtgggttgtaacgtctttgatgatataattcactttacttgccaggcacagtggctcacgcctgtaatcccagcactctgggagactgaggtgggctgatcacctggggtcaggatttcgagaccagcctggccaacatggtaaaatcctatctctactaaaaatacaaaaaaattagctgggcgtggtggcatgtgcctgtaatcccagctactcaggagactaaggcacgagaattgcttgaacccaggaggcggaggttgcagtgagccgagattgtgccactgcactccagcctgggtgacagagcaagactccatctcaaataaataaataaaaataaaaattcactttacttctgtgtggactttcctgggctattagctcttgcaatgttagtgcttctcaaaatgccactatgttgggtgttccttgtctactgtgtgttagtttgctggggctgccataacaaaggactgggtggcttcagcaacagaatgcattttctcacagttccggaggctggatgtccaagatcaaggtgttggcagggttaatttcttctgaggcctcctgtcttggcttgtagatgatcctcttctccctgtgtcttcacctggttctccttctgtgtgtctgggtcctaatctcctcctcctcttcttttgtttttgagacagggtctcgctctgtcactcaggctggagtgcagtggtgtgatctcagctcactgcaacttccacctcccaggcttaagcatcctcccgcctcagcctcctgagtagctgggattacaggtgtgcaccaccgtgcctggttaattcttgtattttttgtagcaacggggtttcaccatgttgcccagactggttttgaactcctaggctcaagcaatctgcccaccttggtcccccaaagtgctgggattacaggcatgagccactgtgctgggcctacaacgaccactttaaagatcctgtctccaaatacagccatattaggaggtcctgggaattagaatttaaacatatgcatttgggaggggtggcacaatttggcccataacattcacaaactgccagagtgacccccacccgaccctcctgccctggccatgtgacaaccaaaaaataccaattagagggctggtactactcccagctaggcataactcaacatagtattccctttggacaatccctgaattgcatccaagggtgggtagacattctccaaaccaatcaatttattttttttttttttgtgacagagtcttgctctgttgcccaggctggagtgcagcggcgtgatctcggctcactgcaacctctgctttccaggtttaactggttcttctgcctcagcctcctgaatagctgggatttcaggcacgtgccaccatgcctggctaatttttgtatttttagtagagacagggctttgccatgttggccaggctggtctcgaactcctgacctcaagtgatccgcccacctcagccccctaaagtgctaagattacaggcgtgagccaccatgcctggccttattttattttttgagacaaggtctcactctgtcgcccaggctggagtgcagtgttgtaatcatagctcactgaagcctcaaacacctgagctcaagaaatcctccgtcctcagactcctgtataactagaactacaggtgtgcccccaccacacccagctaattttaatttttttttttttttgtatagacaggggtcttgctttgttgcccagactgggcttaaactcctggtctcaaacaatcctcctgcttcagcctcctaaaatacaaggattgcgatcaatttattgatcaataagctcccttaatcaatagcagaatctttcctgttttgtctgagaacaggtgcttatagcaaggagactgtgaggagagcaggtggtgggagaggtcggagctgatttcacttcctgtttctttgatttgttttaaatctacttgttcttttatttcgttattaaaaaaattttttttgagatggagtgtcactctgtcacccaggctggagtacagtggcatgatctcggctcactgcaacctcctcctcctgggtacaagcgattcttgtgcctcagcctcctgagtagctgggattacaggtgtgcgccaccacatccggctaatttttgtattattagtagagacggcatttcgccactttggccaggctggtctcgaactcctgacctcaagtgatccacccgccttggcctctcaaagtgctgggattacaggtgtgagccactgcacccagcctcgttatttatttttaagagatgggttctcaggacgtggcccaggctggagtgcagtggcatttcacaggcacgaccccactactgagttttggttctgtctgtcctctcttctcacctctgcccacctctgcagctgccctgatgcatcactaccaaagccagctcctgtactgtccgcagcctgctgagtgggtgggtgtcgtgttgtaaaccctccacccaggggactgttatgtcaagcaactttatctggggtcaggggaagttcccacatttcagaagagggaagttgttttctgatatgcgtattgagaaatggggaagcaggggtctgtggtcacgtctctaggaggcccctggtggaactggtcccaacctatctcccttccacatctctcatgattatctaattgcagagaggtaaatatgaaagaggtcactttttaccactttaggtccaggggagcaacagttggataaaaataataaccatggtttatcaaacatatattgtgtggtaaataaatgcagtggctctcattgaatcttcaccatgactttgtgaggttggaatatttaccaacgcccgccaatctttttttttttttgggcagagtctcactctgtctcccaggctggagtgcagtggtgtgatctcggctcactgcaacctttgcctcctgggttcaagccattcttctgcctctgcctcccaagtagttgggattacaggtacaccgtaatgcccagtgaattttttcgtatttttactagagatggggttttgccatgttggccaggctggtctcaaacccctggcttcaagtgatctgcctgccttagcctcccaacgtgctgcgtgctgggattataggtgtgagccactgtgcccggcccccatttttttttttttttaaagacagggtctcactctgtcacccaggctgaagtgcagtggtgcaatcacagctcattgtggcctcaacctcctgggctcaagtgatcctcccacctcagcctcccaagtagctgtggctataggtgtgtgccactacacctggctaaccaaccccattttatacctgggcaaactgaggcccagaggtggggtctcacggcttgtccattgtcatttagtgggtaaatggcagaactgggattcagattccatctgtgcctcccactgtttgttgatctctttctacagctgccttctttttttttttttttttttttttgagatggagtctcactctgttgcccaggctggagtgcagtggtgtgatcttggctcactgcaacttccatctcccaccccagctccctcgttcctcgggagaggtgactctgagatgcatgttccacattatctcctgaaagtccccactagggtaaagctccacctgcctagagagatagcctgctcaactaacacatttttggttaatttttaaaattaaaaaaaattttttttagagagacagcatctctggccaggtgtggtggctcacgcctgtaatcccagcactttgggaggccgaggcaggtggatcgcttgaggccatgagttcgagaccagcctgggcaacatgttgaaaccccatctctactaaaaaatacaaaaattagccgggcgtggtggtgcgtgcctgtaatcccagctactcaggaggctgaggcaggagatttgcttgaacccgggaggcgaaagttacagtgagctgagattatgccactgcactccagcctgggcaacagagagactctgctaaaaaaaaaaaaaaattagagagacaggttctcgctgtgttgcccaacctagagtgcagtggtgcaatcatagctcactgcaacattgaactcctgggttcaagcaatcctcccgccttcgcctccagagtatctgagactacaggtgtgtgccactgctcccagcaataacacatcttttaacacatcttgttctttctctgccttacttttttttttttttttaacagagtcttgctctgtcgcccactgtaacctccgcctcccaggttcaagtgattcttctgcctcagcctcccgagtagctgggactacaggcctatgccaccacacccggctaatttttgtatttttagtagagacggggtgtcaccatattggccaggctggtcttgaactcctgacctctgcccttgtgatctcctcgtgatctccacgtgaactcctcgtgatctgcccatctcggccttccaaagtgctaggattacaggtgtgagccaccgtgcccagccctgcctcatttcttcacaccccgttggtgtttcctgggatcatctccaaaataatctacctgcatgcattaaactccttatctcagagtttgcttttgggagaactcaaatgatgatgctatgggatgagtgtcatcatcaaagatgagtttgtgaaatggttctggtttgcctgggactgagggactcctggattgtgggacttttggtactaaacctgggaaagtcccgggtaaaccagaatgaattgactatccttataggaggatagtgtggcatcagggaagccaagagaagagaatgcttcaagaagaaaaaaaatgatcaacagagtcaaatgttgacccagcggtcaagtttggtaagactgagaaacaaccagtggactttgcaccgaggaagcatttgggacattggttcatcctttggtgtgttgcaagcagaagttagattgcagtggttgaacagtgaggaggttggagcaagtgaagacaacacagtggaaacaagcttttttctagaatttttttttttttttttttgagatggaatttcgctcttgttgcccagtctggagtgcagtggcgcaatctcggctcaccgcaacctccatctcccgggttcaagtgattctcctgcctcagcctcctgagtagctggggattacagacatgcgccaccacgcctggctaatttcgtatttttagtagagagggtgtttctccatgttggtcaggctggtctcgaactcctgacctcaggtgaaccacccgccttggcctcccaaagtgctgggattataggtgtgagccaccacaccccacctttttttctagaattttggctgtgaagaggaggagagatagagtggctattgcagagggaaagcagattaaggggagactttttggatagaaggggcctgaacatgtgtcctctcttttccttccttcttttcttttctcttttcttttcttttttctttcttccttccttcctttctttttcgttctttctctttctctctctcttcctctctctcttccccttgcttccctccctccctccctccctttctttctttctttctttctttctttctttcttcctttctttctttctttctttcttttctttctctctttcttgatggagtcttactctgtcacccaaactagagtgcaatggcatgatattgactcactgcaacctctgcctcctgggttcaagtgattctcctgcctcagcctcccaagtagctgggattacaggcccctgccaccacgcctggctaatatttgcatttttagtagagatggggtttcaccacattggataggctggtctcgaactcctgacctcaggtgatccacctgcctcggcctcccaaaatgctaggattacaggcgtgagccactgcacccggccatgtcctctcttttcttccaaaattcctattattctcatattaaacaccccagtcttccttttattcttccaagattttaatcttttggccttttttcctcagtgctttgagctatttctcctgtgtggtcttctaagcctcaaatttggcttttgagagtgatgacttaaaaaaaaaatcacccagcatcaatagcagacaggtgctaaagaaaaataaaaatcatccagtaaaatatcttcttaaatgtattccttttttattaagttccatagaactagaacttttgggcatgcacttgaatcttcttacattctttaatttttttattttttgcaaaataaacttttatttggagggacagcataatttagagtccaggctcttttacactttaaacatttatttatttatttgttttatatagacaaaaatatatatatttatcatgtacaacaggatgttttgaaatatatctacatcgtggaatgactaagtcaagctaattaatatacgattacctcatataacttttttttcttttttttgtggtgagaacacttaaaatctctcatcaggcgcgatggcttgtgtctgtaatcccagcactttgggaggccccggcaggtggatcgctgcttgaggtcaggagtttgagatcagcctggccaacatggtgaaaccttgtctccactaaaaatacaaaattagctgggcatggtggcatgtgcttgtagtcccagctatcgggaggctaaggcaggagaattgcttgaacccaggaggtagaggttgcagtgagcctagatctcaccactgcactccagcctgggtgacagagtgagactcagtctcagaagaaaataagttagcctgggccgggcacggtggctcatgcctgtaatcccagcactctgggaggccaagtcaggtggatcacctgaggctgggagttcgagaccagcctgaccaacatggagaaaccctgtctctactaaaaatacaaaattagccggacatggtggtccatacctgtaacgccagctacttgggaggctgaggcagaagaatcgcttgaacccgggaggcagaggttgcactcacgccgttgcactccagcctgggcaacaagagcgaaactccatctcaaaaaaaaaaaaaaaaaaaaaaaaattagcctgtatctagcaaggaagtaaagccagtaggaagctgatggtttgagggaatgagtgagtttaaagagcaagtttatggccaggtgcagtggctcatgcctgtaatcccagcactttgggaagctgaggctggagaaccagttgagctctggagtttgaggctgcagtgagctacgatcatgccactacactccagcctgggtgacagagtgaaactctgtcttaaaaaaagagcaagtttaggatgagtgggactaagaacttgaggaaaaggacctcttcatttacaaaaagtcaaggaaatatttgcagtggtcatgctttgggtttccagggacaagcattgactgaatacaccatagtgaagagaaatgcaatttaccacacatttgttgagagcctattgtggagaacaaacagcttgggaagtaaaggttgattacttcctctccaaggatgatatgtttaatgaattcccttttccttagcttcattcttcataatgccaaagagatccatggatatgattttccatatggagttgaatattctagttttaatattttctcttcacttgtcctggaaaaacatccccctataaaagaggtttagattaaaggtggatgtaagggtaaaataaagtaaacagacaaaatcaacaacatggaaaaacagcaggagtgatttaaacccagtttgaaccagcaggcaaggatggcatgatctcctagcatttaaaaatcctagggcagatgtggtcttctttggcttagagtgggaagacttatcaaaaattcagcaggaagaattcttctttttgataaattttcagacatattacactctggaatttcagccccctggatgtttttttgtctatgaagaaaggttagagtcttgttggctttgtttctctttgaatgcctgttatctaacatagtgcctgacacactgtagtactcaacaaatgttctctttgcaccccacaacttacagcttggtttagcagccccaagctccacagaggaaccaacatctcctgaagaagcctatgaggttagtgcttcctagcctagttataagagttgtgggcaagaagttcaaagttacatcttccttcctggtatttatggttcattcatagaatttcccatctagatgcaatttacaagtcaagcttgactttttccataggcaacattgcctggcgacctatctgatcttccaactttatcacgtttcttgggaacagagttagaaagttaacccaaggtcaaacttgtccatagagaaagagtttcattagctttttactcaaactctgtgcctaaaaaataaaagcatggagatttttctgtagagatggggtcttattttgttgcccaggcaggtctcaaactcctgacctcaagcgatcctcctaccttgttctcccaaagtgctgggattactggcatgagccaccatgcccggccaaagctaatgtatttcttaaagagagattcatatatacatgtatatatgaatatatatgtatattcatgtatatatgaatatatatgtatattcatgtatatatgaatatatgaatatattatgagtacatatgaatatatatgaatatatgaatatattatgactatatatgaatatatatattttatatatatattatatatatatatatatatatttttttttttttttttttttttttttttgagacagggttttgctctgtcacccaggctggagtgcagtggcctgatcttggcttgatcttggctcattgcaacctctgcctcccgggcttaagcaatgctcctgcctcagcctcccaaatagctgaaactacaggctacaggcatgcaccactacacctggttaattctttgatgtttctgcagagacagggtctcactatactgcccaggttatatttgatattttccccttccaaagatacactcatattattcaatttccacaatgttaaacgattttccttatttcattgtggagaaccaataactggaatgctggcagctttgggaattattttggattatctgggaaacctttcataggtcacagtcaacagttggcacttttactcttgttgagaataattaagcctaatattaatcaaattttttttttgagacagagtttcattcttgtcgcccaggctggagtgcaatggcatgatctcggctcaccgtaatctttgcctcccaggttcaagcgattctcttgcctcagtctcctgagtagctgggattacaggcacctgccaccatgcccagtggctcacacctgtaatctcagcactttgagaagctgaggcgggcggatcacttgagatcaggagttcgagaccagcctggccaacatggtgaaacaccatctctactaaaaatacaaaaaaattagccgggtgtggtggcgggcgcatgtaatcccagctactggggaggctgaggcaggagaatcgcttgaacccaggaggcagaggttgcagtgagccgagattgcaccactgtattctagcctgggtgatagagtgagactctgtctcagaaaaaaaaaaaagtgaaaagaaaagaagagacaggttctcactatgttgcccaggctggtctaaaactcctggacttgagtaaaaccatggcaatattgccctaaagctacctaactgtgactatggaaattgctactttgcattcagtgttgtgggatttgcacgggcagtactcattttccctcatacttcggattgaccacagttgttacggcactcttataaataggattttcacccgtgtcccatttggcattcattttctccttttcaaatttagcaaactcccttctgtcatgaattatcattaaaagcttccatatcagcagtaatgcaaggccaataagaacaattccagcaaccacaccagctacaattggaatgatgtctggaccagtgggacactctggattctccacaacatgaaccatgacctcgttgttcccattcactgaatacgtaaaatagaaccaacagtcgtcaacatccttctccttacaatgggacacaggatcaggttggaccggctggggtaatttgtcccgactttctaccttggtaatgttaaaataggaacattcctgtgtgcatgtgtctttcttttctcctttattgaaggctctgcactgaacacattctttatgctcagcacagacaccaaggcaggtctgacacatctcacacgtttgcccttgaaacttcggatctgtacacttacagacaccacactcgcagatgccccggccattgcagatctgtccgttgctggcttcacaagtactagtataatttttaaaatgttttattattttgaaaataatgttgtaattcatgccagggactgacaaaagacttgagacaggatggttattcttgtcagctaaggtcacattgtgcctttttgaccttttcttcctggactattgaaatcaagcttattggattaagtgatatttctatagcgattgaaagggcaatagttaaagtaatgagcatgatgagagtttctgttaatcatgtattaaaactgatttttagctttacaaatatgtcagtttgcagttatgcagaatccaaagtaaatgtcctgctagctagttaaggattgttttaaatctgttattttgctatttgcctgttagacatgactgatgacatatctgaaagacaagtatgttgagagttgctggtgtaaaatacgtttgaaatagttgatctacaaaggccatgggaaaaattcagagagttaggaaggaaaaaccaatagctttaaaacctgtgtgccattttaagagttacttaatgtttggtaacttttatgccttcactttacaaattcaagccttagataaaagaaccgagcaattttttgctaaaaagtccttgatttagcactatttacatacaggccatactttacaaagtatttgctgaatggggaccttttgagttgaatttattttattatttttattttgtttaatgtctggtgctttctgtcacctcttctaatcttttaatgtatttgtttgcaattttggggtaagactttttttatgagtactttttctttgaagttttagcggtcaatttgcctttttaatgaacatgtgaagttatactgtggctatgcaacagctctcacctacgcgagtcttactttgagttagtgccataacagaccactgtatgtttacttctcaccatttgagttgcccatcttgtttcacactagtcacattcttgttttaagtgcctttagttttaacagttcactttttacagtgctatttactgaagttatttattaaatatgcctaaaatacttaaaaaaaaaaaaataaaaaaaaaaaaaaataaaactcctggacttaagtgatccttccaccttggcctcccaaagtgttgggattacaggtgtgagccaccatgcccagcctctttttagatgtctattctgtcatttattcaaaaagccaaatatggaacgaaatgtcacatagtgcagaaagctcattctgtgttgcactgagcctgagttagtgcaatggaagaacagaataccagcaaccagattccagaagtatcatctttctaacagggctatgtcctcccccagaaaggtcccatgattccctgcacccatcctctgcaattatgcagagcagctggggcagaatccctcccctggagcctgttccatggcgtaccgtcactctgtgggcccacatccacatctttatggacagtgggcatttgggggaagatgatcactctgctatgcctacacttgtaaatttcccccagtgagagtctgtgttagattgcattggttctgatgatatgtttcacccatacatcttcacacagcaagaatacatatgaaaaccagcttaagtgctgttagtgagcagagaggagtcactgaggaacaatataacaagaatgaggaactcaaaccaggttatcgggaaaaggactcttcctcataccctccaggaaagcaagtttgtactaagactagctcctcaaagctaccctacgtttcccaggctggtgtcaaactcctgggctcaagcgatcctcccatcttagcctcccgagtagctaggactacaacgccaccacacctggcttcctttttttttttttttgagacagggtttcgctcttgttgcccaggctggagtgcaatggcacgagctcggctcactgcaacctctgctgcccggattcaagcgattcttctgcttcagcctcccgagtagctgggattacaggcatgtgccaccatgcccagctaattttgtatttttagtagagatggggtttctccatgttggtcaggctggtctcgaactcccaacctcaggtgatctgcccacctcggcctcccaaagtgttgggattataggcgtgagccactgtgccaggcctgtggcttcctttttattattattattttacattgtggaaattgaataacatgagcatatctttgaaaaaggaaaatataggccgggtgtggtggctcatacctgtaatttcagcactttgggaggctgaggtggtaggactgctcgagctgggagatcaagaccagcctgggcaacatagggagactccatctctctctctataaaaaaaattagtagggcatggtggtgcacacttgtggtctcagctactcaggaagctgagatgggaggattgcttgagcccaggaggtcgaaaccgcagtaagctatgatcacgccactgcactccagcctgggtgacagagcaagaccctgtctcttaaaaaaaaaaaaaaaggaaaatataaattaaaaactagaggaagctcagcaaacgaactcaggagcagaacaccaaacaccgcatgttctcacttgtaagtgggagctgaacaatgagagctcatggacacagggaggggaacaacactcactggggcctgttaggggacgttggaggggggagagcattagggaaaagagccgatgtgtgctgtttttgtttgtttgtttgtttgttttttagacagagtctcgctctgtcacccaggctggagtgcaatggtgcgatcttggctcactgcaacctccgcctctcaggttcaagtgattttcctgtctcagcctccccagtagctgggactacaggtgcataccaccacacccggctaatttttgtatttttagtagagatggggtttcaccatgttggtcaggctggtcttgaactcctgacctcaggtgatgcacccaccttggcctcccaaaatgctgggattacaggcatgagccaccatgcccagctaatgctgggcttaatacctaggtaatgggttgataggtgcagcaaaccaccatggcacacgtttacctatgtaacaaacctgcacatgtaacctcagaacttaaaaaacaaaaacaaaaacaaacaaacaaaaaaatcccaaactagaggaagtttgcagtgtcaagagaggagtatgtaaaacattagaacaattcagatgtttcacttacctcactgggttttgagtcaggacccatcttgctggaaagtgtgtatgtctcagactcagattttgattttacgatctctctaaaccacttttgatattgtttctggacctggaacatcaaaggaaatacctggatgggttttgctaacattggtgaacagcagaaaggtcggtgagtcaggaagaggatagagatgtattattatttatttattttcacaaaacatggtctattcgtacaatggaatattactcagtcttataaaggaaggagattctgacacatatgctaccacacggatgaaccttgaggacatcaggctaagcgaaataagctggtcatgaaaaggcacatactgtatgattctacttatatgaggtacctaaagtagtcaaatccatatagacctaaagtagaagagcggtttccagggcctggggggaaggagagtggcgaggtagtgtttaatgtggatggagtttcagtttgggaagatgaataaagttccggagatggatgttggtgatggttgcaccacattgcgaatgtgatgctactaatggtacacttaaaaatggttaaaaaggtaaattttatattatatatgttttaccacagtaaacattttcattacagggtatataattgttgtagaaaatttatggccaggtgtggtggctcacacctgtaatcccaccactttgagaggccgaggcgggtggatcacgaggtcaggagattgagaccattctggctaacacggtgaaaccctgtctctactaaaaatacaaaataattagatgggagtggtggctcatgactgtaatcccagctactccagaggctgaggtaggagaattgcttgaacctgggaggcagaggttgcagtgagctgagatcacggcactgcactccagcctgggagacagagcaacacttcatctcaaaaaaacaaaagaaaagaaaagaaaaaatagaaaatgtataagatatgcatatgcaaaaggaagaaaatagaagttgcatataattcctcaatctagtgaaaatcaccaataatattttggtagtacccttcaatgtgtcttggttttgggcacctcagaagcagaccctgcaacaagggtggaagtgtaaggagtttatttgaggggtgatcccaagaagcaccagtagggcaatgaggaagcaggacagggaagagaaggcagctggtaaagaatgcataattaaggttatttccactgtgggaatctggggctcagccccattcaggagctctggggtagagcatggaactaccttagagtcaacttgcctgaaggaggagggagctggggtatttatccaccagctcccatcagtcatgggttgatggccggtctcaagggccattactctttggcatcaccagtttgccctatgcatgggccaggcgtgtcctgtgggcagtacgaagccttcaggcacagtcatgggtgtttgcaacaagcaactccaggcatgtagagacagaagccaaagggatatgagagggccgtggacagcatctgccacaccgtgatatcctaaccttggcactgttgacatcttgggttggatcatgttttgctggagagggctgtcctgtgtgcattgtttaggatatttagcggtatccctgacctccaccaactagatgccagtagaaacccccaccccagtaatgacaagcatttccccagacattgctaactgtcccgtggtgggaacacaattgctcctggtaagaaccattctgatatgccataaacacccatacctacatataaataaatacataacaataacacaaacaatgagtgcttatactcgttatataaacaaaatgaaaccctctggggtagtttcttttgtttttttttgagacggagtctcgctctgttgctcaggctggaatgcaatggtgtgatctcagctcactgcaacctctgcctgccaggttaaagtgattctctagcctcagcctccctagtagctgggattacaggcaggtgccaccactctcggctaatgtttgtattgtttagtagagacgggctttcaccatgttggccaggctggtcttgaactcctgacctcagatgatctgcctgcctcggcctcccaaagtgctgggattacaggcacgagccaccacgcttggctgggttccattgtggagacagcgtgcagtccagattatccctgagcaccccttagtaagggatcttcttggaggacacagactactgttcagttgcagacaaataaagtgttttgaatttagtagccatatgaaataaaactatatatatctttaaaaactggatgctaggccaggcacgatggctcacgcctgtaatcccagcactttgggaggctgaggcaggcagatcacctgaggtcgggagttcgagaccagcctgaccaacatggagaaaccctgtctctattaaaaacacaaaattagctgggtgtggaggtgtgcacctgtaatcccagctactcaggaggctgaggcaggataatcacttgaacccgggaggcagatgtcgtggtgggctgaggtcgtgccattgcactccagcctgggcaacaagagccaaactctgtctcaaacaaaaaacaaaaaacaaaacaacaaaaaaacgaataacaaaaactggatgctatgatatgcctcacaaactgagataaactaagggaagagtacatataagtgttttgcgtatgctcatgtgaaaccccatctctactaaaaatacaaaaaaaaaaaaaaattagccaggcatggtggcatgcgcctgtagtcccaggtactcgggaggtggaggccgaagaatcgcttgaacctgggaggcagttgcagtgagccgagattgagctactgtactccagcctgggtgacagagcaagaatctgtctcaaaaaataaataaataaataaataaataatgatgatgatgacgatgaaacacacactctgctagtggtgcctgtgaaccaagtggagatgagttctgcctcctgcctcagcctcctgaagtactggaattatgggcatgagtcactgtgcctggccccagtttctctttaacgaggcagttaacctgcagtacagtgaagttcaagacctcatcatgcccactgctgttccatggtttgagatgtgagttgcaaaaactgcaatagcagactgggatggatctatgagtttgcccctgcagacagccagtgttacaaggaaggctgtgtgatcctggaatgtgacctagtttgggacagtgacagctttaaggggcagatatcatctgatatgtcttgaagaaaaagagataaatcagtccagcatggtggcttacacctgtaatcccggcactatataattggtattgactggaagcttcttctttttctcttttttttttgagacggagtcttgctctgttgcccaggctggagtgcagtggtgcgatctcggctcactgcagcctctgcctcctgggttcaagtgattatcctgcctagcctcccgagcagctgggattacaggcgcctccatcatacccgggtaattgttttgtagtttttagtagagatggggtttcgccatgttcgtcaggctggtctcaaactcctgagcacaagtgatccccctgtgctggcctcccaaagtgctgggattacaggcgtgagccactgcaccctgccgattggaaactttttctgaaatagggcagaactgcttgggtgtttttttccatgtaacttaaggtagtaatgtaaataaaatagtagttggaaaaaaaataattcatgtgaagtggtgtgttagctgcattgttgatctccacgattcactcctttgtagttgtattacactctgtcttagtctcttggtgggttgagtgttcttttctcattgactttgggcttgggtgtgtgactttctttggctaatgggatattagtagaggaagaatcacaggcttgagtgaccttgcccagtagggtctgcctctttgtgatttcagcattgttaggagaagaatatttgctggggagttgctcccccttctgcttaagcctcaggatgagtcacaaggagcaggcctaaatctgatctgcatcctggagcaaaggcaagctgagctcagctaagatcaggtgaaccccaatagacctgtagaccccagaataagaaaagcaaatatttgtgtttaaaccaatgagattttttgaggttgtttgttacacagcattagctgactattacgagtgggaaaactgagaaaaaggcatgatttttttttgacatagcaattatttatattctgaaatgtgttaataaatgatgtatcttaacaactagtagcatttttaaagtagagaaaatagagagagtgtttacaggtggattataatctcatgtggaacatttagagaatgtcaacttaaatccccattgaactccatttccaaaattttcttaagtttaaataacaaagaaaggggtcagtgtttacctgctggctgaggaggcagtagaccaagaagatgaagaagccttggaggctgttgatgatggtgaagaggtaggccatgacctgggcagctggacccacctgtagcaagcccagacaccatgtgcagcccaggatgaagagctgagctgttgctttgaaagccagcatcctgggaggaggaagtcagagattaggatgtcaaaaaactaataatgagcatgaacacccctctagttagctgttaatagtaagaactctggagctagactacctgagtttaaatggaagccagcactggctacctgtgtgatcttgtgaaagctgctttaccttcttgcaactcagctccctcatcttattttattttattttattttattttatttttgagatggagtcttgctctgttgcccaggctggagcacaatgacatgatctcgactcactgcaacctccacctccagggttcaagtgattctcctgcctcagcctccccagtagctgggactaactacaggcatgcaccatcatgccctgctaatttttgttatttttagtggagatggggtttcgccatgttgaccaggctggtcttgaactcctgacctcaagagatccacccatcttggcctcccaaagtattgggattaaaggcgtgaaccactgcacccagcctcagttcccttatcttaataattgtcctatttcgtggggttgctataaagattacatgagactttaatgggaaagtatttaggacaatgtatgggacaaagttagtaccagacatgcataaggcatttgaaaacctgggtgctttctctctcactcttatcatttatagacaggggtcatataattttttttgttgagacggagtctcgctctgtggcccaggctggagtgcagtggtgtgatctcagctcatgggttcaagcgattctccagcctcagcctcccgagtagctgggattacaggcacgtcaccacacccagctaatctttgtatttttagtagagaaggggtttcaccatgttggccaggctggtctcgaacgactgacctcaaataatccacctgcctcggcctcccaaagtgttgggattacaggtgtgagccaccccacccggccggggtcatataatttgttattcaaacaggaaggcttttgtgatcaaaaggaggtgtactgttcctaacagaaagaaatgataaatgtttgaggtgatgagtaccttaaataccctgatttgatcattgcacattttatgcatgaatcaaaatatcacaaatactttgtaaatgtatataaatattatatatcaataagaataaaaataataataaaaaatgaaagggatactattaataattacattgtgtcgacagacataaactgagactgttccaggtaagctgagatatgaggccatcctatttatagtatttatggcatatatacacacacaatatatatatgtacatatatattttatatacactatcacaacatataatcacaatatatagtgatagtgtatataaaaatatacattgtgttatatatgtatagaatatattatatgtgtatgtatatgtgtgtacatacacatataatatctatattacatgcatatatacattatatatatccctaattattaaggatattacatcagtgaggaaagctaattgaggaacagtttgtatagtgtgatcctattgtgtgtgtgtcggtctgttctacttaaaagtgcacagagaaagctctgggaaaatgtcatattttatctcacacatcatacaggctgttaattctggcttcctgggaagtggaagtagcaggaagagggacagccattttcattttttactgtatatatttcaaaagactataaaaaaatgtaacaaagttgtcttatttttatgattaaaatgaaaacaacaaattacatgctcaaattaaaatggatgctgcaacataaaaatactcatacctcaagatattttgaaatattatacaagatatcttttaatctagattcttattgaacctatcacacacgattggagataaacatttaaattggtatatgtacagagagtttaatttgtaatttaagcatgtgatttaatatagctagattgatctctattggctggggtggacatagctttgtgacattaccagattcatttttagggtttctatataatttaagcttcttagtaactgttggattagcaaatttgagttggttgcttttgataaaaaatatactcctgtgtgtatcttgtgtagtgtggcagaaacgaatgtttttctcccttttcatcttccttttagtgttagatctcttcccctttgagttttaaaacaaggcacatggtcaaggtagagactacatttcccagcctcccttgcagctgggtgttatcatgtgacaaagatcagccaatgggatatgagcaaatgtggcaactgcaactcctatattacctccttcccatggatgggatattgacaagggcaacatccttctagaggatggtggagcaacaaagtagaaagcacctgagaccctggaacactgtgtggagcagagcttctttattagccctgaactggtcacttctgggttgcaacatgagactgaaataaacttctattttattcttttttttttttgagattttttctttatcacagcagcttagcttgtattctagctaactcaggttctcattaactgtgatggtggaagattacagtggtcttgctagtcctgggagcatggctgttgaatgtacgtgtgtatggatatgtaggaaggactggcagaaggaaagggaataggaagtaccatttgtcacatcctaccttgtgttctggatggttgacacttcactattgagggaggaaagttttcttttcaaaatccaaaagaccaagataaacaatactaaattcgcctgcaggaccaacacaaacaaggcagagtgcaagttaaagtaatgtatggtgtccactttaaattgcacacaggagtcctaccctcttgtacatgggactgaattggtagcaggtggaaaatcaaaccacccaacagtggaaatgcaagccccttgtaccatcttgtacccagcacttctcttggttcttcctagtttgggaacatcgaaggcacatactcacagagaaaatggcacagactgggccaaggaaactccacatgaatccctggtccaggtggagccagcatctaggaacagtgggaaaagagatacaaagagagatcagagaaagtgcgtgagatcaacataaagtgtctcttttcctaccagagaattgtttccagtttctcttgaaagtcagctgatgacaggccaggcacggtggctcacgcctgtaatcccagcactttgggaggccgagatgggcggctcacgaagtcaggagcttgagaccatcctggctaacgtggtgaaaccccatctctactaaaaatataaaaattagctgggcgtggtggcgggcacctgtagttccagctattcgggaggctgaggcaggagaatggcgtgaactcggtaagcggagcttgcagtgagccaagatcgcgccaccgcactccagcctgggcgacagactgagactccgtctcaaaaaaaataaaataaaataaaataaaataaaataaaataaaataaaaagaaagtcagctgatgacaatagcttttttttttttttttttgagacagggtcttgctctgttgcccaggttggagtgcagtggtgcgatctcagctcactgcaacctctgcctcctggattcaagtgattctcctgcctcagtctcctgaatagctgggattacagatgtgcaccaccacacccggctaatttttgcatttttagtagagatggggttttgccatgttggccaggctggttttgaactccagacctcaagtgatttgctccccttggcctcccaaagtgctgggattacaggcgtgagccaccacgcccggccaacaatcagctttgattacacattttgattgcaactttgatccacacatcatgtgacagccactttcactttatatatttcaatatatatatgaaattttatgaaaattttatgaaaattttaacaaacttgtcttatttttatgattaaaatgaaaacaacaaattacgtgctcaaattaaaatggatgctgcaacataaaaaatactcatagctcaaggtattttgaagtagtagtatacaaaatatattttcatttagagccttattgaacctattacacacaattggagatacatatttaaattggtatgtgtacagagagtttaatttgtaatttaagtatgtgatttaatatagttagattgatctctgttggctggggtggacacagctttgtgacattaccagatttttggggtttttatagaatttaagctttttagtaactgtggtgtgatttaggataataggcaccaaacagctaggaggaacagcgtcctgttaagcattttaggagcacagtcctgttgaattttcacaccagcactgtgaggttggaacaatggggacaactattattctcatctcgctaatgaggggactgagactggagagctcaaattacaggaagaataaagttgggacctaactcttgtgatccgagagattgaaatagacacttctatatccactaacatggatcctaaggttaaggaaaccaagttacccatgggtcgggggttcagggcctggctggtgaagcaactgtctaaattcctcggctacaagaaaacccacgcttgctaaactccataacaatacgagccatcagttccctcctacctctgatatacgatccagaccactataactctgactggaaagggaaccagtcaaagcaattatggatcttaagccagtttcagttagtttatagaggctgtgcacaaactgtctttgtgtcctttggttcaacttttggtgtagagccacattcctcgtcattgtttattttattttatttatatattttttagagttggatcttgctctgtcactcaggctgtggtgcagttgctctatcacaacttactgcaaccttgaactcctgtgctcaggcgatcctcccgccccagcctcctgagtagctgggactacaggcatgcaccaccgtgtccagctaattaaaacaattttttttttttggtagagatggggttttgctatgttgcccagcctggtcttgaagttctgggctcaagcaatccttcctccttgccttcccaaagtgctggggttacaggcgtgaaccaccatgcctggtcttccatttttttttttttttttgagacagagtttcgctcttgttgcccaggctggagagtgcaatggcgtgatctcagctcactgcaacctccacctcccgggttcaagtgattctcctgcctcagcctcccaaatagctgagattacaggcgcgcaccaccacgcccggctaattttttgtctttttagtagagacggggtttcactgtgttggccaggctggtcttgaactcctgacctcaggtcatccacccgcctcagcctcccaaagtgctgggattacaggcttgagtcactgcgcccagcttttccatcttattttaatgctaaaatcctgccccaaagtgaacatgggatatatgttatatatatgtttatccattgtgcatacactctgctctcatcttaaataggtacagcttttccaaacctcctgaatgtgtatgactctgttgtgtaatacagatctagtgaggcataaaacctaacttgtccttccccttttcaaagagggagcacctttggttcatcctggagactttctttttttggtttgcaaaccagtattgccaataaagctctcctttctctctctttctctttctttcttccttccttccttccttccttccttccttccttccttccttccttcctttcctttcctttcctttccctttctttctttctttctttctttctttctttctttctttctttctttctttctttctttctttctttcttcctttcctcctttcctttcctttccttcctctttctttctttctttctttcttttcttttcttttttctttcctttttcttttttttttcagagtctcactctgtcgtttaggttggggtgcgttggtacaatcacagctcactgcaacttccacctcccgggttcaagcgattctcctgcttcagcttcctaagtaggtgtgtgccaccacgtctggctaatttttgtatttttagtagagatgggttttcacatgtgggccaggctggtcccgcactcctggcctcaaacgattctcccgccttggcctcccaaagcgctgggattacaggcatgagtcaccgtgcccgaccttaaagctcttctttctattatttattcatcttgatggtcttttgaacaacaccccaaaccctctccttctgaagccatccctataaactttataaaaataatcagagaagacaaaacggggagaaatgaaaacaagccaaacttgcagcacatccaggattcactgccaggtcagcttgctctctgacctgcttcctactagctgtttggtgcctgttatcctagaatcacacagatcctagataacagtttccctttactgctctataggtaacaacttaaatattataaaacatgaagtttcagccaggtgtggtggctcacacctgtaatctcagcactttgggaggccgaggtgcatggatcacctgaggtcaggagttcaagaccagcctggtcaacatggtgaaaccccatctctactaaaagtacaaaaattagctgggcgtggttgtgggcacctgtaatctcagttacttgggaggctgaggcaggagaatcgcttgaacccgggaggtggaggttgcagtgagccaagaccgtgccattggactccagcctgggcaacaagagcgaaactctgtctcaataaaacaaaaaaacaaaacaaaaaaaattaagtttccccttgagatattctttcaggtcctgtgtaccagtgaaactactggcttcagctgctctgaaggaccacagaaggagctgagtcaccaaagaaggcagtttccgtctcctgatgattttgtctgctgtaccctgacccacattttccagcctccacaccctccatgatccctttaaaagtcccagtcccgaactccttgaggagattgatttgagagtcttctctcatcttctcgcttggcgccctgagatttttaagctcttttttttttttttttttgagacaaggtcttgatctgtcacccaggctggaatgtagtggcctgagcatagctcactgcagccttgaactcctgggctcaagcaatccttccatctcagcttcttgagtagctgggactacaggtgtgaaccaccatgcttggctattttttttttttttaatctttagtagacacaaggtcttgctatgttgcccaggctggtcttgaagttgtgaactcaagtgatcctcctgtctgggcttcccaaagtgctgggattacaggtgtgagccactgtgctcagctaattttttgtagagatgagggccttgctatattgcccaggctggtcttgaactcctggcctcaagtgatcctcccacgttggcctcccaaattgttggtattacaggtgtgagccaccacacctggcctcattaagctctttctctgctgcaaaccctgctgtcttggtggattggtacgttactgtgcagtgggcatatgaacctgttggttgtataagacttccagaaccttgcaaactcttaccaccatctcaccctgctttgttgggaaagaggttagagctgttataaaggagaacgtagagtgcattggttacgtatattcccaccatcatcatgaatgctgccctcaaaagctttcttaggaaactgtccatgacacaaggtgggattcaagctcaccgatcagcagttccataaaggtgaggccaggaggctgcagaaatggccacagtcacagcgggaacgccatagccgactgggaacatgatccacttcatgagtctattgatgcttgagtagttgaccactgtcaggttccgtgcagtgaggaagaggtgcacaccctccagcagcatccaggtgaaggcggccaggtagagatagtgcaaagcaccggcgatgatggagcacagcacctgggggaggagaaagggatgcctgaaggggttgtcagggtggagtatggccctaggacctctccttgacattggctttgggttcagagcacctgacatcagaccaagggcactaaaagtaaaggggaactggatgcagtggctcatgtctgtaatttcagcactttgggaggctgaggtgggaggattgcttgagcccaggagtttgagaccagcctgggcaacttagtgagaccccatctcaattatatttaaaaaaatagatagttgatagtcaaggatagctttggccacctgggcaccaatcccttcaacctgcccttgggactgaaagggtagcagaatgtgccacctccacctatgccactttgcaacagatcaccagaatttacccctccttttaaactaagactttgtatactttgagctatgtctcctttcctcatccacttcccccctcaacctctgagaacctccattctactctctactcctactgtattgcgtggtgactatagttaatatattatgaattttgaagttgctaaaagagtggattttgttctattttatttctttgtgacaggatctcactctgtcacccaggctggagtgcagtggcacaatcatagctcactgcagccttgaactctcaggctcaagtgatcctcccacctcagcctccctagtagctgggactacaagtgtgtgccaccatatccactaatttttgcagagacggggtctcactgtgttgcccaggccagtctccaactcctgggctgaagtgatcctcccgccttggcctcctaaagtgctggtattacaagcatgaaccgccaccccagtcctaaaagagtgaattttaaatgttttcaccacaaagaaatgataagtatggaagtgatagatatgtttattatcctggtttggtcatttcataatgtgtatgtctatggaaacttcacattgtaccccataattttatacatttattatttttcaattaaaaataaaatttagaaaaaagtttcactttagcataagagattattattatgattatgattcttttttttttgagacatggtcttgctctgtcacccaggctggagtacagtggttgcaatcatagctcactgcagcctcgaactcctgggttcaagcaatcttcctgcctcagcctcccaagcagctgggactacagacgtgcaccactgtgtccagctaattttgttattttttttgttttttttgtagagacaaggtctcactatattgcccaggatggcctcaaacgcctggcctcaagtgatctttccaccattgcctcccagtgtgcagggattgcaggtgtcagccactgtgtctggcccaagggattattttaaactgaaggcagttgagaagaagcagatacaaaaatagctctctgccctccccctatttgcctaaaagcaggacatacgtttttgtacttgtcttttttggggggtgagaacacttaaaatctactttgttagcaatttttcaatatagaatatattgttattgactatagtcatgatgtacaatagctctcttgtatttattctttccgtctagctgaaatttggtatcctttgaccaacatctccctaaaccccttccctgctgccttagtctctgctaacaaccattcccctctttggttttatgagtttggctattttagattccacacataagtgagatcatgcactgtttgtctttctgtgccttgcttatttcactcagcttaacaatctccaggttcatccatgttatcacaaatggcaggatttccttctttttctgaaggctgaatagtattccaggacattagtttacaaaggcattcctcatacctattctcttccttctaccctcctacccttgctatgggggggacaaaagttgatcactaagacaacttatttatttatttaagatggagttttgctcttgttgcccaggctggagtgcaatggcgcaatcttggctcactgcagcctctgcctcccgggttcaagcaattctcctgcctcagcctcccaagtagctgggattacaggtgctcatcaccacgctgggctaatattttgtatttttagtagagacggagttttgccatgttgaccaggctggccttgaactcctgacctcaggtgatctgcccacctcagtcccccaaagtgctgggattacaggtgtgagccactgtgcccggccaccgagacaactttagatcctcattggtctggagccaacaccagaggaatctacaaaaccaatgatatggtttggctctgtgtccccacccaaatctcatcttgaattgcactcccataattcccaaatgttgtggggaggacccggtgggagataatttgaatcatgggggcggttttccccatattgttctcgtggtaggaaataaatttcacgagatctgatggttttatcaggggtttctgcttttggatcttcctcattttttctcttgcagccaccatgtaagaagtgcctttcgcctcccgccatgattctgaggcctcccctgccatgtggaactgcaagtccaattaaacctctttttcttcccagtcttgggtatatctttatcagcagcctgaaaatggagtaatacaaccaatgatactagtaagcctttatctatcactcatttcccagatatttgccttcccataatttgtgcccctagagagccaagatctttttcccttcttcaaaaattcatcattctttgtcaaaaacgctgtcgttctaaactacctctttgagaatgcctcgttacctgggtatctcccatgtatatatgaaatatgaatatatgttaatgaacttctgtttgctttttctcttatctgtcttttgttacatgggtcccagctacgatctcagaagggtagcgggaaaattatatttttctcctctacagacccaaggacattttattaaggaatctagtgcagcattgctccatgagctcagtgtaccttggggcagaaagggcatcctctgagacactgtcagtaccttgggttcagttcgatcaatccccacgaggaagaggaggtgggccaggaagaggcagagcgagagctgcagatgcagtgaggtgctggtgttccggatggctttacacaggagaaaagtgagggccgccaggaggaggcacagcagagagacgctcagccccacgtaggtgatgacagtcagcacgggatcctcctcctgggaccgagaaaaaaagttcacagtgatgctttcctgcactgggattatggctccctccttgaactggggcatcctagacacaggcaccaagcccagtggtagtgtgggaccgttagactgctaatgtagattgctaatgtagactgctaatatacactgctaatatagatggctaacgtagattgttaatgtagactgccaatgtagattgttaatacagactgctaatgtgattgttaatgtagactgctaatatagattgctagactgtcttttttattttcagctttattgaggtgtatacttaatgtatcaaaaattactcatattaaatgtatacactttgatgagtttggacatatgatttttttcccctaaaaaaagtagaatggcagttaccagaagctggggagaggagagagagagaatagggagttggttaaggagtgaagagtttcagtattgcaagatgaaagagttctggagatggatggtggttgatgattgcacgatatgattgtactttactgaactgtatatacatttaaaaatggcttagatggtaaattttatgttctgtgtattttaccacaatctttacaaagtgatttttgggccatggtgtctcacacctgtaatcccaatgctttgggaagctgaggtgggaggattgctggaggccaggagttcaagaccgacctgagcaacaagtgagaccccgtatctaaaaaaaaaataaagtgtctttgtatgcagagggcttgtgctatgcagtaccagtttgatcagagagctcatactaatgaagggatttaaaaaacttttttaagttcagagatacatgtgcaggtttgttacataggtaaacccctgtcgcgggggtctcttgtacagattatttcatcacccaggtattaagcttagtacccattagttatttttcctggtcctctccctcctcccactctccaccctctttgtgtctgttgttcccctctttgtgtccatatgtctcctcatgtagctcccacttataagtgagaacacgagtatttggttttctgttcctgtgttagtttgctaaggataatggcctccagctccatccatgtccctgcaaaggacatgatctcattcttttttatggctgcatagtattccatggtgtatgtattccatatgtaccacattttctttatccagtctaccattgatgggcatttaggttgattctatgtctctgctattgtgaatagtgctgcagtgaacatacatgtgcatgtgtctttatgatagaatgatttatattcctttgggtatatacccagtaacaggattgctgggttgaatggtagtcctgttttcagctctttgagaaagtgacatgctgctttccacaatggttgaaccaatttacaaccccaccaacagtgtgtgttcctttttttctgctacctcaccagcatctgttattttttgactttttaatagtagtcattcatgatgtggtttatagtaatcatggtttttttttttttttttttttagacagagtctcgctctgtcgccaggatggagttcagtggtgtgatctcggttcgctgcaacctctgcctcccaggttcaagcaattctcctgcctcagcctcctgcgtagctgggacaacaggcgtgtgccaccacacctggctaatttttgtatttttagtagagatggggtttcaccatgttggtcaggatggtcttgatctcctgacctcgtgatctgcctgcctcggcctcccaaagtgctgggattacaggtgtgagccactgtgcctggcccagtaatcatatctttgccctggggtcctatagtctgagcaactgaggtcaaccatgtaggcattgcatccctatgtgaatgatcccccaatacacaccctgaacaccaaagctctggtgagcttccctggctgacaacacttcacatgcgttgtcataagtcattgctgggagaatgaactgcatctgtgtgactttcctgggagaggacactggaagcttgcaccaggtttctcctggacttcttaccttgcgtcttttccacatgttgatttttttttttttgagatggagtcttgctctatcacccaggctggagtgcaatggcttgctctcagctccctgaaacctctgcctcccaggttcaagccatcctcttgtctcagcctcctgagtagctgggattacaggcatgtaccactatgtttggcgaatttttgtatttttagcagagatgggtttttgccatgttggccaggctggtttcaaactcttgacctcaggtgatctgcccgtcttggcctcccaaagtgctgggattaaaggcatgagtcaccatgctcggccttttttcagtttttttttttttttttaatagcacttattaccacttagtaggggctcagaaagtatttgctggaagaataaaacatatacatcatacctggctggtcagggccatcaggacagcgaagctggacaggtgactgcaattacacatggtgtgactcttgttcacgtgtatcaggaagcagccatccctggaccactggctgccctgccctgtgctcttccagtagacacagaagacctttttggtactgggggtcatctgaaaatagaaaatagaaagggctcattgtctttgtctttctttctttcttttttttttttggagacaaaatcttgctttgttactcaggctggagtgcagtggctcaatctcggctcactgcaacctccgcttcctgggttcaagcgattctcctgcctcagcctcccaagtagctgggattacagacgtgcagtaccacaccaggctaatttttgtattttttgtagagacagggtcaaccgtgctgcccaggctggtctcgaactcctggactcaagcaatcttcctgcctttgcctcccaaagtgctgggatcatacaggcatgagccactgcatctggccagctcattgtctttttcctcaggagggacagttctcagtgttggcctatgccagggtgccacctgctaaggcacctgtgtgaagagtgactcaggtgatttctgttttgtttgtttgtttttgagacggggtctcattctgtcacccaggctggagtgccgtgacgcaatcacagctcactgccaccttgacctccctggctcaaacgatcctcccatctcagcctccagagtagctagaactacaagtgtgtaccaccatgcccagctaacttttgtatttttagtagagatggggtttcaacatattgcccaggctggtcttgaactcctggcctcaagcaatcctcctgccttggcctcccaagaggctgtggttatgggcatgagccgctgtacctgatttctattttatgcggccaccaggacccccgatccataaccgcagctcttttgggattttatgtaacataaaataaagcaaaggctccctgggaaccacagtttcaagagatttctttggttttagaaccttgccccaaccatgggaggaaaaaaacaaaaaaaaacccaaaaaaagcagtggagtctgaagctctcatgtttttccctaaagtctctctaagccaaatgtccctggtcgttgtataatcaattttgtctctactcccttacaacacaataattgcttatgcaatgagaggcatgatataggaaagaaaagtcatgaggagagagaataaaatgagcctttgaagccgggcacagtggctcatgactgtaatcccagcactttgggaagccaaggcgggtggatcacctaaagtcaggacttggagaccagtttgtccaacatggccagacatcatcgctactaaaaatacaaaaatgagccaggtgtggtggcacttgctcgtaatcccagctacttgggaggctgaggcaggagaatcgcttgggcctgggaggcggaggttgcagtgagctgagatcgcaccactgtacttcagcctgggcgacagagactccgactcaaaaaaagaaaaaaaaaaaagaaaatagaaaaacaggtcggatgaagtcgttcatacctataatttcagggttttaagaagctgaggtgggagggttgcttgaggccaggagtttgagaccagcctcgacaacattatgagtccccctctctaccaaaaataaaatagttagttgggcgtggtggcacacacctgtagttccagctgctggggaagctgaagtgggagagtcccttgagcccaggagtccgaggctgtagtgagctatgattgtgcaactgcactccagcctggacaacagaatgagaccctttctcaaaaaaggtaaagatatagatcaattaactttaataataaattttatttaacccactatatccaacatagtatcttttaaatatatcagtataaattaataaatataatcaacatagatattatcaaggagatattttacattcctttcttcttctctttctttttttctgagacggagtctgactctgttgccaggctggagtgcagtggcgcgatcttggctcaccgcaacctccgcctcctgggttcaagagattctcctgcctcaccctcccaagtagctgggactacaggcatgtgccaccatgcccagctaatttttgtatttttagtagagatggggtttcacgaagttggccacttgatcacttgacctcatgatccccccaccttggcctcccaaagtgctgggattacaggtgtgacctttcttcttttctttttttgttttgatttactttttaaaaatgtatttttaatttatacattataattgtatatatttatgggatacagtgtgatttataatacttgtatttgcataccatgtagaatgattacatctagctaattctttttttttttttttttgcatttattcttattggttctctgaaactcctggatctgtggtttggtgtttgacattggtttggggaaattctcagtcacttccctctctctcttcctccctccctccctccctccctccctccctccctccttccttccttccttccttccttccttccttccttctttcctctttgtttctttgtttcttttcttcttctccttactgtttttcttcttcttccgacagtgtcttgctctgtgccccaggctggagtgcagtggtgcaatcatagctcactgcagcctccaactcctgggctcaagcaatcctcttgcctcagcctcccgagtagctggaagtataggagcatgccaacctgcctggtttaaatcaagctaattgttttcttcttattaagtcttcaaaggctgatttacaagatgtaaatctggaaatactgtcttcaaaatctcgattcagaccagctacatttcaaatgctcaatagcgacaggtgctcctgactacgaccctgaacagagtgggtctagaaccacagcctgggatgatacacacatcgtttggcctgcctccttgagaacccacaagctcaaatcatacctgtgacccaccttcacgtgctggaaagtcagcgtcacagacttggagagagacacgttccttttgggtccaatagcagcactcacaacctgagagttcagatacacttgatctttcttatccatctcttcaaaaaaagttgcatttatgatgtttccaagagaagaatatgagataaaggcaatggcactgggacctgaggaaacagaaagatggaatcttttttcttttcttttctttctttttttttttttttttttgagacggagtctcgctcttgtcgcccagccaggctggagtgcagtggcgtgatcttggctcactgcaacctccgcctcccgggttcaagtgattctcctgcctcagcctcccaagtagctgggattacaggcactcaccaccatgcctggctaattttttgtctttttagtagagatagggtttcactatgttggccaggctggtctcaaactcctgacctcaggtgatccacatgtcttggtctcccaaagtgctgggattacaggcatgagccaccatgcccggtctgccgttttttagaagagttgttctcagatggagcttaaatcctgtgatccctggaggattcgttttaacagagtgctggcaccgggcatggtggctcacacctgtaaccccagcactttgggaggctgagggggtggtggatcacttgaggtcagaagttcaagaccagcctggtcaacatggtgaaaccctgtctctactaaaaatacaaagattagctggttgtggtggcacatgcttgtaatcccagctacttgggaggctgaggctggagaatcgcttgaacccaagaggcggaggctgaagtaagctgcgatcacgccactgcactccagtctgggtgacagagtgagactccatctcaaagacaaaaaaaaaaaaaaaaaagatgttttcctacaaacaacccactttttgcattttctggaaacttcaaagtctggtaacactgagacaatgaataataatctatttcttcctacaaaggctgtaggtacggtgggcaccctggctcgaatccctggcattcttggtttctttaatatgctgattaattctgctgtaagcatcggtgattctgcctgggaacttccatgggcgtgaatttgtgtttggcctgcacagaggacaggctggaagagcttgaaagttcagcccccggagcaaccctccaccaatgatagatcagagcagatggacagacgtcctagctccctcttctcgaatgggacagctcagtgagattgagccccaggtaccccaacagcaagctgctcactcaggtacctacctcattggctgcctttacttgcctgtcttactttgcctcttacctactgtgatagttcattttacatgtccacttggttaggccatggtccccagacatgaggcatggatgttgccatgaaggtgttttaaagatgagattaatatttaaatcagtagactgagtaaaacagattgcctgctataatgtgggtgggccttatccaatcagttgaaggcctcaagagaaactagactaaggtctcctgagaaagaggtagttctggcctcagactctctttggattcaagctgcactatcagttctaccttgtgtctcctgcctgcctgcccaccctgcagattttggacatgtcggccttccatagtcacgtgagccaattctttaaaatgactctcctcgtccctcctcatctctttctttccttctctctccccatctctctctttccatctctctcccccatttctctctccccatctctctctttcgatctctcttttgatctctttccacatctctctctttccatatatctctccccatctctctaattccatctctctctccctatctctctttccatctttctccccatctctccccatctctcgaattccgtctctctctccacatctctctctttccatctctctccccatctctctctttccacctctctccctctctctcttttcatctctctctccccatctctctctttccatctatctctttccatctttctctccccatctctttctttccatctctccatctcgcttttgatctgtctcttcccatctctcgcttttgatctccctctgcccatctctctttttccatctctctccccatctctctttccatctctctctccccatctctctctttccatctctctccccatctctctaatttcatctctctctccccatctctctctttccacctttttccccatctctctcttttgatctctctctccatctctctttttccatctctctctctccatccctcttttcatctctttctccccatctctctctttccatctctctccatctctttctcctcatctctctctttcgatctctgtctttccatctctctctccatctctccctccccatctctctctttccatctctctccatctctttctccccatctctctctttcgatctctgtctttccatctctctctccatctctccctccccatctctctctttccatctctctccatctctttctccccatctctctctttcaatctctgtctttccatctctctctccatctctccctccccatctctctctttccatctctctccatctctttctccccatctctctctttcgatctctgtctttccatctctctctccatctctccctccccatctctctctttccatctctctccatctctttctccccatctctctctttcaatctctgtctttccatctctctctccatctctccctccccatctctctctttccatctctctccccatccctctcttcccatctctctccccatctcttgcttttgatctctctctccccatctctctctttccatccctctcctcatctctctctttccatctctctctactcatctctctctttccacctctcttcctatctctctcccccatctctctctttgcatctctctcctctccatctctgtccccatctctctctttccatctctcttcccttctctctctttccatttctctccccatctctgtctttccaccactctccccatctctcttttctcatctttctctttccatctctttccctatctttttccatctctcttcccttctctctttccatctctctccccttctctctctttccatcgctgtccccatctctctctttccatcgctctccccatctctctctttccacatctctctccccatctaattccatctttctctccccatctctctcttcccatctgtctctccccatgtctctctttccacctctctccccatctttctctccatctctctttacccatctgcctctccacatctgtttctctccatctctctcatctcttgctctctgtctccatctctctctctctctctctctctctctctctctctctctctctctctctctctcccctcttcccacacccccccacaccctacactcttcagctctttagttgtgattctctggagaacactgatgaatacacccactgttgttcctggggatcacctcccaaagaaacttctcacacttctttcagggtttgcttctgggtgaacccaaaccgggacacaggcagaacagcactcccccaccatcccaaattgcaaagtccctcccatactgaataacagaaaacctccattttgggaaaatgtcttttttttttttttaaagggaaaatctccaatatcgtagtttgagggtaaaaagcccatgaggggagagcccagtgggcttgtttccccatgactcacacaatgacatggctctgtgtgaaggattctgaatgcagccatcaggcataccttgtgtgtctccctggatgatgtcactgcaacggatgtccattgagttcatttggacgttcaagttgaatgtctttctttcttcagagcaattgtctgtaatcgcttgagtttcaatagctggtaagaaaagcaatgggcaggcttagtgatattgtaagaaactttaaaaatatgcataggaacaggacatggtggtgcatgcctgtagtcccaactactcaagaggctgaggcagaaggattgcttgggcccaggaatttgagcccaggcaacacagtgagatgctgcctctaaaaaaaaaatgttcatagcaacataaatggctcacatatactgaatgtctaggatgtgtcgggcactgagctaagagtcttacacatgtcaccttataaacctataacttcatcagggacaactctatagatgaggaaactgaagtcagaagttaggtaagactctaattcctgaaaccaagttcttaactaacagctcttagcatacacctttgaagatacagttctatttctaggagtttattctcagaaaacgattgtggatggagggcagatttagctacaagaaagttcatagcagcttagatgataatggtggaaaatgggggattatctagatgttcaacaagaggtgattgattaaataagtgatgatatgggctgggcacagtggctcatgcttgtaatcccagcactttgggaggccatggcaggtggattgcttgaggccaggagttcaagaccagcctggccaacatggtgaaaccccatccctactaaaaatacaaaaattatctgggcatggtggtgtgcacctgtaatctcagctacttgggaggctgaggcacgagaatagtttgaaccggggaggcagaggttgcagtgagctgagatcacgccactgtactccagcctggatgatggagtgagactctgtctcaaaaataagtaagtaagtaaataaataaataagtgatgatatatctctgtggtggggaaccagggcttcaaataaaaataaagtcacaaatgaattgcaatcaagaaaaactcatgagaaaaaaggtaaccatgtgagtgatggatgtgttagctaatttgattgtggtgatcattccacagtatatatgtatatcaagtcatcctattgtacaccttaaatatatacaattttctttatcaattacaccttaataaagctaaaaaatgttaagctcatgaaaatatgtatcttaaaaacagacaacccaagactggctgtgagatggaaatcgttgaattgggtgatgggtgcatcagggattttattctcctatttccttttgtgcatattaaaaggttaaaaaaaaaaagaagcaagcaacaaaacagcacatcaagaatgacactattttatggctgggtgcagtggctcatgcctgaattcccagcacttttgcaggctgaggccagttgattgcttgaggtcaggagttcaagaccagcctggccaacatggtgaaatcccattctactaatacacaaaaattagctggtcatggtggcaggcacctttaatcccagctactaggaaggctgaggcaggagaattgcttgaacccaggaggcagaggttgcagtgacctagatcatgccactgcattccagcctgggcaatagaatgagactccatctcaaaaaaaaaaaaagaaaaaaaaaaaaagaatgacattaatgacattctagaaactactactggtttgtctaatattgactctcagtttttgaaaagtttacaagtatttactctaattatgtattaatgtttttggcctactgtttcattcatttagtacgttttaatgaatagaaattcttgagctcagtgtaagtgaatttattgttattattattatttttgagatggagtcttgctcttttgcccaggctggagtgcagtggcttgctctcagctaactgcaacctctgtcccccgggttcaagcgattctccttcctcagcctcacaagtagctgggattacaggcatgcaccaccacgcctggctaattttttttagtagaaacagggtttcaccatgttggccaggctgatctcgaactcctgacctcaagtgatccgcctgccttagcctccaaaagtgctaggattacaggatgagccacctcatcctgcccacaatgttaatttcatcatccattatattatcgcttgttactctttgtcatttttatcaaacctcaatttgacttgtttttatattatttaatattttctacattaaactatgtgtttcctgtaaaaaagaatgacactattttgacaatatttcataatattaaagagtggaaagatagaataatcataattatagcaattactaccgtagtttttcttctttcttaaaagtttgagtcgtttagcttctgagggatcctagtcctaggtgcattacatgcactttcattatctctattaaaatttttttttgagacaggctctcactctgttgtccaggctggagtgcagtggtgcaatctcagctcactgcagcctcgaactcctgggctcaagcgatcctcccacctcagcctcctaagtagctgggacctcatttgcacaccaccatgtccagctaatattatcctcattttattgacaggagaatgaagcccaatgaggtgagggcactggtctcagatcaaacagttaggacgtggcaaaatcaggagagatgagatttacttgcaatctggaaaatggtttaattttgaaccaaagtatccagattccagttttccaagaagaataggcactgactttttcaaagcctgctgtgtgtgtgttttttttttttttttttttaatttaagatggagtcttgctctgtcacccaggctggagtgcagtgatgtgatctcggctcactgcaacctctgcctccccagttcaagtgattctcccacctcagcctctggagtagctgggattacagtcatgagctaccacgccccgctaatttctgtatttttagtaaagattaagtttcaccatgttgcccaggctgatctcaaactactggcctcaagtgatccacccaccttggcctcccaaagtgctgggattataggtgtaagccaccatgcccagcccaaaacctgttttttttttttttttaatgagacaggttcttgttctgtcatccaggttggagtggcaatggcatgatcatagttcactgcaccctcaaactcctggactcaagccatcctctccctcagcctcccaagtagctgagaccacaggtacaagccactgcacctggcaaattttaaattttttttaaagagatgggggtcttgctatgttgcccaggccagtcttgagctcctgggctgaattaaccctcccgcctcagcctcccaaagtgctgggaatacagtcgtgagccatcatgcctggtcctcaaactacatttaagtgaaaattccagacctgggattggaaactattggcaatcttctgaataaacaactttattgaggtataattgatgtctaaccaactgcacatattaaagtgtacaatctggtgagttttgttgggtgcacacacctctgaaatcaacaccacaatcaaggcaggaagatttccatcacccctaatagtttccccagattttctcatgcctctgccacccctccctcctgcccctccctgtcactctagataagtttgcgttttctagaatttatataaatttttgtaatttacataaagggactcatgtggtgtattcaattttttttttctaattgcctaacccagatcccagctgctaaccagtccccagggtgtatcagtcctcattattgtcttacctacactatcgttttggattttcaggactttttgttctggatctttcaaggcagtttctagaactttcgattccacatcccggagaatagtggtagctgtggatgagatttcttgtctcccttctgttctccataaagtctgattggtgagaagtgactcaaatttgtccacaatcttttgcagctttgaagacataaagaattttcattttttaaaaatgtaatctggtaagtcccatatccaaaagaacagtagaaagcatgagaaagcaggctctggagctggaggaaccacgttcaaatcctggcacttcatcatgtcccagctttgtgaccttgggcaagtcactcaatcactctgtgccccacgacaggaaaaggaactcaaagggtttttctggaggattaaatgagttaacagatgctcttcttttaggacagtgtctgtatctggtaaaagctatgtaagggtgagtcactattattatttttgagacagagtattgctctgtcgcccaggctagagtgcagtggtgggatcttggctcactgcaacctccagctcctgggttcaagtgattctcatgcttcagtctcctgagtagctgggattacaggtgcacaccgccatgcttgcttaatttttttaatttttttttttgtatagacagggtcttgctatgttgcccaggctggtctggaactcctgggctcaaacgattctcctgccttggccttccaaagtgatgggattataggagtgagccaccgtgcctgattgggttagttattattaacgttttttgccaacaaggtagtgataagtttgttagaaatagaccagtggttctcaacgggggggtgattctgctactccctccacagggcacatgtggcgatggctggagacattttcggttgtcactgtcgcaacaagggagtggttgccactattgaagcagcgtcactgtctggggtaaatacccagagtttgtcatcttgcgccaagatgaaggacatggacacacacgaggagtgagtttaggagtggaggtttaataggcaaaagaaaaagaaaagagggcagggtgcggtggctcatgcctgtaatcccagaactttggaaggccgaggggggtggatcatctgaggtcaggagttcaagaccagtctgaccaacatggtgaaaccccatctctactgaaaatacaaaattagccgggcatggtggcgcgtgcctgtaatcccagctagttgggatgctgaggcaggagaatcgcttgaacctggaaggcagaggaggcagatgttgtagtgagccgagatcacatcactgcactccagcctgggtgacagagtgagactccatctcaaaaaaaaaaaaaaaagaaaagaaaaaaaaaaaagaaagtagaacagctctctcccttgcgagagagagggatgcccgaaagaaagcaaaatcctgcccaccgactagattttatattcaggcactagattttatagtcaggctgaggaggcggtgtctgaattatgtagggcccacagattggttgggccaggtgcgacatttacttactgctcggggaaggctggttgccctacccacttggccagtaccatcttgtctgctccttactgtacacgtgactggcaaagagaagggaagatggagctgccattttgatcatgtctagtcccaggcagccttttcctattggcacagctgctggcattgacccataagcttccagcttgcttgtctatgtccgcagcttgattttacaggctgctctttgttagaaaagaaaatttggggctgctcttcattaaaaggaaaacctcactgaggacttccgtaccctcaccatctgcctaagtaatttcttcttaactcctatatcattgtgtatttatttatttatttttgagatggagtcttactctgttgcccaggctggagtgcagtgacgtgatctcagctcactgcaacctctgcctcctgggttcaagtgattctcctgcttcagcctcctgagtagctgggattacaggcatgcgcccccatgcccggctaatttttgtgttttttgtagacatgggggtttcatcatgttggccaggctggtcttgaacttctgacctcgggtgatccacccacctcccaaagtgctgggattacaggcattagccgccatgcccggcctgattacttgattctttatttgttcattacttcagtgatcattccttgaactcctaatttggggttggtcttattcccttcctcaaaaagctcacagtctagggattgattacatgatgtaatcacatatttatataaatgccgtcagttggccggagacaataatggataccattggatacttggatgtcttttgcagcagtgcagcaggccttaatatactctctcttggcctgtctttcttggtctgggatagattcctgtctttagatggcaacacacacacgctcatacacacacactcacacactgtcatatgtatgtacgtacatgcacactgtgtgtgtctatctatacctatatctatatatatatataagtagatacagatacagagccctcttggtatacgcatggcattggttccaggatcgtccatatatgctcaaatccaatccatgcatactcaagacccatggaactcactcatgaaaagtcagtccttcctctttgtgagttttgcatcctgcctatatatacatatatatatatatatttttttgtttgtttgtttgttttgttttgttttttgagacggagtcttgctctgtcacccaggctggagtgcagtggcaacatctccactcaccgcaacctccgcctcctggattcaagtgattctcctgcctcagcctctggggttgctgggattgcaggcatgtgccatcatacctggctaatttttgtattttttagtagagatgaagtttcaccatgttggccaggctggtctcgaactcctgacctcaagtaacatgcctacctcggcctcccaaagtgctgggattacaggcgtgagccaccacgccaagcccggcaatactgtagttttgattcacatttggttgaaaaatgtcctcgtgtaagtggatccccgcagttcaaatgtgtgttgttcaactgtatatatagtgatatatctatagtgagctggataatgatacatatatagtggtatacctaatggtatatctgtatctatctatctatagatatatgtatacataccacaattatgcataatatataattgtatataatatatgaatatgtactattgtgtagtaatatgatattatatggtaataatatattatgtatttatatataacatattctttgtcctaaataatacattatatatgtatatataatatatattttgccctaaatccatccccatttgctcactttgggctttgtaaatatttgttactgatgtttgttacctgggaagggtctggggatcagcctccactcacctctttcctgccctcggttgtctttgaggaggtggtgtctgcaaaagacatcatgatggagttactattggaactgagagtgaccaggcagaggggtgggcaggtggggtaagtaatggggtgagcaactttgcacctagaaggtaaaagcctgaattcatagtctttatctgctgtttgttgatttttaaaaaattttaaattttatttaaaaaattttttattttttatttttattttgagacagagtctcactctgttgcccaggctggagtgcaatggtgcgacctaggctcactgcaaccttcacctcctgggttcaagtgattctcctgcctcagcctcctgagtagctgggattacaggcacgcacctccaggcatggctaatttttgtatttttagtagagatggggtttcaccacgttggccaggctgatctcaaactcttgacctcatgatccgcctgcctcggcctcccaaagggctgggattacaggcatgagccatcgcacctggctttttttttccctttttttttttagatagggtctcattctgctgcctaggctggagtgcagtggcacaatcttggctcactgcaatctcaatgtcctgggctcaagcaatcctccacctcagtcccccaagtagctgggactgtaggtgtgtaccaccagacctggctaaattttttttttttgtattttttgtagagatggggtttcgccatgttggccaggctgatctcaaattcctgacctcaggcaatccacccgccttggcctcctaaaatgcaaggattacaggcgcgagccaccgtgcctggcctccaaattcttttattccatcttgactggaaattagaactgaaatgtccgagaaaacagaaaattagaagcctcttgtgtttaaagtcagcctggctgggaatgataaccgaaacagaagcatcagtgtctggtcatcagctgttaatgaagacttttgtgttggtttctgtgcttagtgaggacatctctgctttagaaatttgaggaagggtgcacctgtagtcccagctgcttgggaggctgaggcaggaggatcatatgagcctaggcattcgagaccagcctggccaacatggcaaaaccctgtctctactaaaaatacaaaaattagctgggcatgttggcgggtgcctgtaatcccagctactcgggaggctgaggcaggagaatctcttgaacctaggaggcaaaggttgcagtgagctgaaatgacaccactgcactccagcctgggagacagagcgagactctgcctctgaaaaaaaaaaaaaaaaaaaaaaaaaagacaaggaaagtctagcaaatgtttacatatcttttatcatcatgctgaggttaaatctgtacttattctaaattttggttttcagctcagtctatttgcttaaaagcacaaacagctttgttttaatactgaacattttatcttaagagttcaagaactttgacttacaaccctgagtctagaatatgtttgttataggaaaccgtatttattgtagaaaactgcccttttgaaccaaagctgcacactttatcattgggtgggggtgtctgttgcttagagctgccagccttggtaataacgaaccccaaatgggctcagtctttataaaaggacggtgcagacctcttaacattaggaaaacaaccaaaggcattttccttttttgtaaaataagacaagtttaagagattaacatcagaacccaggtagaatcacagtctgcttctacactgtcaatagaggtgcgcattgcttagtaaaagacagatttatggctgagtgctgtggcttatgcctataatcccagcactttgggaggccaaggcagaaggatcgcttgagaccaggagtttgagatcagcctgggcgacatagtgagaaccccatctctacaaaaaatgaataaattagccaggtatggtggctcatacctataatctcagccactcaggaggctgaggtgggaggattgagcctggaagttcaaggctgcagtgtgcaatgattgtgccactgtactccagcctgggtgacagagtgagaccccatctcttaaaaaaaaaaaaagtttctctcttattatccctacggtagtcaatacctcatgggtggtctaccaagtctcatctcttttctcatatagactttcccatccatgttttccatgggagtggtcatgtttacatgacacagtatctctccctggacacggatccacgggtgcacatggggctcaaactgggccaatgtattcattcccaaagaatttgcaatggggtctcagagagagagtcaactgatctctctttggttggttggggcaaaaaaaatggtaagatctggagcgggttggtggtcatatttccttttttttttttttttttttttgagacagagtttcactctgtcacccaggctggggtgcagtggcgggatcttgtctcactgccacctctgcttcccaggatcaagcaattcttgtgcttcaccctcctgagaagctgggattacaggcacccgccaccacacccagctaatttttgtatttttagtagaaatggggtttcgccatgttggccatgctggtcttgaactcccggtctcgagtgatctacccgccttggcctcccaaagtattgggattacaggcgtgagccacccctcccagccggtggtcatattttctgtcctgtggtctaggaagcagagaaagccagcctgcagtgaaagagaaggaaggagcagatccaaagatgattagagacagggactaggagatgcaccctgggggtgttgagttcccagttttagttaattccagaagcccagctgcattcctgtccttgcagggcatggctacgcatcgttttcataaacccattttttggcctgttagcctgagtgagtttctcttccttgcaattcaaagaatgtggtctcaatcaccaccttgtcacatcctccatctccaaactatagttccctttctcacccccttatttccctcaacttgaacttccttctttccttgtagttccctgcagaaaataaaaaccacatcctggtcccacaacaaatacgtcttttctgatgttagattcaataaaaaatgaggaaggactgccgcctgtaaaaagtcccagcactttgggaggatgaggagcgtggatcaagaaaaattagctgggcgtcgtggtgcacgtctgtaatctcagctacttgggaggctgagacaggagaatcgcttgagcccgggaggcggaggtttcagccactgcactccagcctgggctacagagcgagactctgtctcaaaacaaaacaaaacaaaacaaacaaacaaaaaaacaacaacagaggaaggaaggcaggaggacaaaaatgttcttaccctgacaggtgttctcattggaattactgaattgttcattcccagaatgcagtctatatcctgggacacattgacagtagaaacttccttcgacattgtaacacacagcgttaaatccacaatatacactatagggtggtgtacattcattaatgtctggaacacaaagaagcaattgggtcattcattcagcaaagatttattgagcagctactatgtgtcaggagttgtgctctttcccccatggtctgtcctggctttccgagacaaatcagtttaggtaatggttatcttggtttttcgctttcttcattgactttggtggggttctccaggaagcagacaatgagacgagaatataagtactttatttgggaggggatcccaggaaacactgagagggcagtcgcgaaatgaaacaagaaactatcttttctttttgagacggagtcttgctctgtcatccatgctggagtgcaatggcaggatctgggttcactgcaacttctgcctcctgagttcaagcgattctcctgcctcagcctcccgagtaactgggattgcaggcatgcaccaccacgcccggctgatttttgtatttttagtagacacggggtttcactatgttggccaggctggtctcaaactcctgacctcaggtgatccacctgccttggcttcccaaagaactgggattacaggcgcgagccaccatgcctggctgaaacaagaaactatcttaaatgaacggccaagtttccaaaacagcccccattttgcctcccttttgctcctgcttctggataacttgcaaattatccctggccaggtgcagggttcacgcctgtaatcccagcactttgggaggccgaggcgggaggattgcttgagctcaggagtttgagaccagccgggacaatatagtaacaatccatctctacaaaaaaaaaaaaaaaaaaaaaaaaattagctgggcatggtggcacgcctgtagttgcagccacttgagaggcttgatcccaggagttggaggctgcagtgagtgtttttatttattttgatcagagtctcgatctgttgcccaggctggagtgcagtggtgcaatctcggctcactgcaacctctgcctcccaggttcaagctattctcatgcctcagcctcttgagtagctgagattataagcgccccacaccatgcccggcaaatttttgtatttttagtagagatggggttttgtcatgttggccagactggtctcgaactcctgacctcaagtgatctgcccacctaggcctccccaagtgctgggattacaggcttgagcaactgtgtccagcttgcggtgagctttgatcatgccacagcagtccagcctgggcaacagagcaagaccctgtctctaataataatgataataaaataataataataaaaaataataatacttctttaccgttacatgtctccaaggggaatgtgaatagtttctgcccagatccagaagtatatccatggttgcaggtgcagtgagtgttattgacacaggaagcatttggggggcacttagcacaggaagctgcagggagaagagaggcaggttaaatggactggggtcacaaactctcctgttataattaggccctgcctcttgatcacctgaggtcaggagttcaagagcagcctggccaacatactgaaaccccatttctactaaaaataccaaaaatagccaggcgtggtggtgcatgcctataatcctagctactcaggaggctgaggcaggagaattgtttgaacctgtgaggcggagattgcagtgagccgagattgtgccactgcactccagcctgggtgacagagggagactccatttcaaaacaaatatatatatttgttacataggtatacacgtgccacgttggtttgctgcacccatttacattaggtatttctcctaatgctatccctcccccagccccccactcccctgacatattatatatgtaaataataataataatgaggcctcgcctctgggcagggcctctcaaggctgaggaagcctgtgccttttcctcttgtgagatctaagcacgttaaaaaattagagtggccaggcgtggtggctcactccgcctggtgaggattttcacatggtgaaaccccgtctctactaaaaaatacaaaaattagccgggtgtggtggcaggtgcctgtaattccagcactttgggaggctgaggcgggtggatcacctgaggtcaggagtttgagaccagcctgaccaacatggtgaaaccccatctctactgaaaatacaaaattagccaggcgtagtggcacatgcctgtaatcccagctactcagggggctgaggcaggagaatggcttgaatccgggaggtggaggttgcagtgagccgagatcgcgccattgtgatcgcaccacggtgagaggcatggtgagcacgcctgttgacatctgtaattccagtgctttgggaggcccaggtaggaggattccttgaggctaggagttggagagcagcctgggtaacatagcaagacactattgctataaaaaataatttaaaaattagccagtcatggtggcatgtgcctgtagtcccagctactctggaggctgaagcgggaggattgcttgagcccaggagtttgaggctgcagtgagtcgtggtcatgtcattacactgcagcctcggcgacagagtgaggctctgtctctaaaacaaaaggacaaaaaaatttgaatttgtatggtaccatgggagggagattctgatcgtggtatatgttaaggtattttttctttaggcttcattacttatgaaaatgataaattcacagaattgaaaaaaaatccaacaataagtctcttattaccccagattctgagctgtctactgcttattgtatacttttcagaaaaataccaatccatatacacacatatgtgcatcatttttctttacgttataggaacatattacacatactgctctgttctttggttttcatgtaaaattttgcctgagaattttttccacagcttcacatgtggagcaacctcattttttttttttttttttttttttttgagacagagtctcgctctgttgcccaggccggagtgcagtggtgtgatatcggctcactgcaagctccgcctcctgggttcatgccattctcctgcctcagcctcctgagtagctgggactagaggtgcccgccaccacgcccggctaatttttgtatttttagtagaggcgggggtttcacggtgttagccaggttggtcttgatctcctgacctcgtgatccgcctgcctcggcctctcaaagtgctgggattacaggcgtgagctactgcgcccagctgcaacctcattattttaaaaggcattgcagtattccatcccggggatggacagtcccaaatatgctactgaaacaagggtgcaattgaccgtgcacgcaagtcttaatgcattttggattttgttttattttactttattttttaagagataaggtctcgctctattgtccaggctggcatgcagtggcagatcatagctcactgcagcctcaacctcctgggctcaagcgatcctcctacctcagccttctgagtagttgagattacaggcatctgccaaaatgcccagctaattaaaaaaatttttttgtagagatggggttcttgctatgttgcctaggctgttctctaactcctgggctcaagtgatccacctgccctggcctcccaaagcactgggattacaggtgttagccaccatgcctagcctttggaattttatttttggataaaaataaaataatatgttacataatttgtatattataatataatatacaacataatatataattatataagatataaattatatatttatacacatatatattgcatatacacacatatgtgtatatatatatatatatatatatatatatatatatatatatagtgttttctttatccacgtgttgattgatgggcatttgaactggttccatatttttgcaattgtgatttgtactgctataaacatgcttgtgcaagtatgttttttgtacaatgcttcttttcctctggatagatacccagtagtgggattcccggatcaaatggtagagctacttttagttctttaaggaatttccacaatgttttccacagtggttgtactagttttaattcccaccaatagtgtaaagtgttcccttttcactacatcaaagccaacatctattatttttttattatggccattcttgcaggagtaaggtggtattgcattgtgatttcgatttgcatttcccttataattagtgatgttgagcattttttcatgtttcttggcctatttttttttttttttaaagacagagtctcgctctgtcgcccaggctggagtgcagaggtgtgatctcagctcactgcagcctccacctcctgggttcaagtgattctcctgtctcagcctcccgagtagctagggttacagatgcacaccatcacacctggataatttttgtatttttggtagagatggggtttcaccatgttggccaagctggtctcaagctcctgacttcaagtgatccacctgcctcggcctccccgagtgctgggattacaggcgtgagccaccgtgcctggcctgttggccatttgtatatagaagaggtggtattgtactcagtggagcaaaatagtcacccactaagtatgcacaattctcctggggggacagggagaggtggtaccctctgccactcatttctttcctatctcttcccttcctgttcaggttctgcttagttcagagtgagctctgaaagtctattcttaatcttttccaggacttaataccttaccatactgagtatactggtttaaatagtgtcctcctaaaattcatgtccacccagaacctcaggatatgacttcatttggaaacagggtctgtacagatgtaatcaagttaagatgaggtcgtactggagtagggtgggcgcaggttgtcccttcatgtagtgtcagggtgtgggctagtttggtcttccttccaacatggtgacctcagtcaggctgcttatggcctccagaactctgggaatgggacttgctgttgtctgggggaggcttggcagagaggaaatgtggctgctggtggctatgaagtgagacttggagcagacggaaattttttggagtgaaatgtggcatgccctgtaatgcaaatacccttccatccttcctgtgaatgggccagtaaaatctaccttgctcatgaatgtcttcttttccatgaatgtcttcttttctgttttttttttttttaaatttggtaacatgcacataatatgaaatttaccatcttagtgcagcactattcacaatagcaaagacttggaaacaacccaaatgtccatcagtgatagactggattaagaaaatgtggcatgtatacaccagggaatactatgcagccataaaaaatgatgagttcatgtcctttgcagggacatagatgaagctggaaaccatcattctcagcaaactatcagaaggacagaaaaccaaacaccgcatgttctcactcatagttgggagttgaacaacgagaacatttggacacagggtggggaacatcacacccagggggtggggggcgtggggagggatagcattaggagaaatacttaatgtaaatgtcgagttgatgggtgcagcaaacaaatatggcacatgtatacctatgtaacaaacctgcacgttgtgcacatgtaccctagaacttaaagtataataaaaaaaataaatttacgatcttagccattactaggtgtacagttcggtggaatttaataccttcataatgttgtggaaccatctccataactgttttcatcttgtaaaactgaaactctgtacccactaaacactcactccaggctgggcatggtggctcatgcctgtaatcccagcaatttgggaggttgaggtgggcagactgtttgaggccaggagttggagaccagcctgggtgtcatggtgaaacccagtctctacaaaaaatgcaaaaattagcccacagtggcacgtgtctttagtcccagctactcgggaggctgaggcatgagattcgtttgaacccaggacgtggaggttgcagtgagccgagatggcaccactgcactccagcctgggtgacagagtgagactctgtctcaaaaaaagaagaagaagaaaaaaagagactctcaggttccaccctagacctgagcccctcccagattcttaacccacagaaaccaagagtgataaccagacaaactttttttttttctcttagattcaagaggtacttgtgaatctagagagagagtcccaggggaataacgttaaacagaaatgaccttgttcattattggttgacttgtttataatcagaatgataatgattagcattcctttgtctctccccactagaatgtctgcttcatgagactttgtgtgttttattttctgttctatctccactttgtactcactgtggttagcaaaaacagacaaattaaaaatcaaacaaaacgataaataaaaggctatccatatttgatataatgataaattaagcaaacaaataatgaaacacaggagcaagccttcccaaatattgctctcagaacaggcacttttctccagcccactggagaccatgagtggctccaggtccagcccttggtccacaagttctctgttctggctctgagcactcacttttggttttctgagtcacagctccaaagaggctcagcagaaagcagaggcctggaatagatgggaaacagaagggagagacatgaaacaattgaggagagattccaagaaatgccccaaggactgtgtatcagttatctatcactgtgtaacaaattacaaaaatgtagtggcttaaagctacatttttgttgagtatggagatctctcaaataactaaaaataggaccactgttggacccagcaatcccactactggatatctacccaaaggaaaagaaatcattatataaaaaagacacctgcactcatacatttacagcagcattattcacaataggcaagtcacggagccaacctaagtgtccaccaacagttgactagataaagaaaatatgccatatatgcaccatggaatactatgcagccataagaaagaatgaaatcatgcccttagcagcaacatggatggagctggaggacattatcctaagtgaactcactcagaagcagaaaatcaaatattgtatgttctcacttatatgtgggagctaagcagtgggcagacctggacatgaagatggagacaatagactctggggactttgcaatagccatgacttggctattgtgaatagtgctgccatagacatatgagtgcaggtgtcgctttgatataatgattattattttttttctttttttgagacagagtctctttctgtcactcaggcgggagtgcagtggcgcgatcttggctcaccacaacctccacctcccaggttcaatcgattctcctgccttagcctcccgagtagcttggattacaggcactcactaccacacctggctaatttttgtacttttagtagagaggtgggtttcaccatgttggctaggctggtcttgaacccctgacctcaagtgatccacccacctcagcctcccaaagtgccgggattacgggcatgagccactctgcccagcccaatgactattattatttttttgggtagatacccagtagcgggatttctgggtccaacagtagttctatctttagttctttaagagatctccaaactcaacaaaaatgttgttttaagccactaaaaaaggggaggatgtggggtggtgagggttgaaaaattacctattcggtacaatgtttaatgtttgggtgatgggtacatcagaaacccagtctccaccattatgcatgtaatatccatataacatacaagcacatgtacatcttgaatctaagaaaaaaaatgtttgttttgttatcactcttggtttctgtgggtcaagaatctgggaagggctcagctgggcggttctagcttgatggtctcatatgattatagtcagttagtggatggggctgcaacggctgagaactagctgggcattgtcccttcacctgttgtctcagggtgttgggcttgtttgggcttccttcaaacatggagacctgaagcaagctgctttaatggaacatctaagctctaagcatgagtgtcccagctgatgaggctgcatttcctcttgacactcatccctgaaagtcacctggctctacttccatcatattcccttggttacaagcaagttacaagctcattcagattcaagtggagaagaatcaaattcttcctccttatgagagaccagcaaggttctagaaacacatttttgatgggggatattatttccacctttttggaaaattgtctgctcaggctggctctattgtggctggtaaagagccctttgctcttccccatgcctttccaacatccgatgatgtcatcagtcatgttcctgcttctgcaaagacctaaagatgctggacagatggactgctttttttctgtcacttcagctttgcaacgactttagcaggaaagtgctattagcatcatctctgcttttcagattaagaaatggaggcacagagaaggtaagtaacttgctccattcactggggctagtcagtggcagagctgaggttaaacacgggttctgggttctagctgataacccattacaccacatagcctctccttcagaaatcccacagggcactacctgcatggaagtgctgttcagattgtagacactgtaggttggcatgtttattgtgacagtgacttgtccttttttcccccggcagatgccactcaccagatctgactggagcctcaaagtcccgtagagagtggtatgtgacttggtcatttagggcagtgcagaccaattgtaggattttggagaagaggccctgggggctaactgtgtgactcttcaggagaggtaatggcagcaatctaaatccttctggatctctctcttgagtttccaattgctgctatcacaaattaccatgactgtagtggcttaaaacaacactgatttattattctcttacaggtctggaagtcagaagtcttaaatcagcctctataggctaaaatcaagaatgttagtagggctggtttcttttggaagctctaggggagaatctgtctccttgccttttccagcttctagaagctgcctgcatttcttggctcacggacccttcctccttctttaaatccagcagcacagcatcttctcgtcttcctgatcttccacctccctcttaagaggacctttgtgattattatattaggccccctggaaaattcagggtactacccccatattaagattcttatcttaatcaacatctgcaaagtttcttttaccatgtaaggtaacatattaacaggttccagggattaggatgtggatgtctctggggggactgttatttttcttcctgtaattctcacccttcccccaagaagatgccaggtctggtttgtgatcagttacttatgcaattgcattcacagaacattttgaatattctcagctgggcttaatgtcaggctgatgtttcctttaaagtccccttccttctacattttttatttttatttttatttttttgaggcaggttctttttctgttgccccggttggagtgcagtggtgcaatcatacctcactgtagccttgaactcctgggctacatgcatgagataccacttgtggccaattaaaaaaaatttttttggtagagattgggtcttgctgtgttgaccgagctggtcttgaactgttggcctcaagtgatcctccttctgtggcctcccaaagtgttggcattatatgcgtgaggcactttcttcttttgtatatacatgaatgtgtagcagccacacaaaccttacgcctgcccaaatgatgactagctcacagggccaactgataaaccatatggctgaatagtgttaccctgttcctaaaactcaggcagtctgggggaccatcatgtttccttaagactagtctttagtctaaccagcaagcctgtactcactaatttgggcaaaggtcttaagttagggtttctgaagagtcatcggtgtgtcagaatcccagagttctaagaaactttagaaatcatccactgacttattttgtagatgaggaaacaggtcccctggggttaagtggctggcacactagttgggcaaatttgggtaagttgtttaacttctctaagcttccttatgtgaaatagggtggcagtatgacctactttgtggggttttggagatgacctaaatgagggactgtgtagagcacaatgtcaggcaggaagtcctccactgatactggctgcctctgtcaccatctgacttcctcctttcccatttggatgctttttctttctctctttttgcctaattgctctagcttgctgcctatattatcatttgagctctgttgctcaggctggagtgcagtgatgcaatcacagctcattgtaaccttgaactcctgagctcaagcgatcctcccacctcagcctccagggtagctgggactgcaggtgtgtgccaccatgactggctaatttttttttttaatgtttcttggagacagagtcttgctatgttgctcagtctggtcttgaactcctggctcaagcaatcttcccgccttgccttccaaagctttgggattataggtatgagcctccatgcccaaccctggaatcctaattcttgacccaatgctcatatcatcacccttgcctgtaccatccagtgatatgggctaaaagttcctggataaccaaaattcactaataatccacctcagaagtgtggaggactctgtctccagttgcaaaaaggcaggcttctttcacatttgattccacatatactgaaacacctcttatatataagatgctatgctaggggttgcaaaggtgagggagacatggcattaggatttaagtgtagcttgtattattttgatagaatttacagcctatcagctgcctctgcagcagaatagctgtgaggctttgagaaattcacagaacctctctatgatgcaatttcttatctgtaatgtgcagatgctatgtgacaatgtaaagcaatttaagcctaatgccaggctaaagtagctgcttaataaatgtaagctttgattgatattgggactatcaatattgttaattcatctggagctggaaagatggatgggatttcatccgtacagagatggtggttgaagccatggaattaggagattcccatagggagagggagtagaaaaacagaagatcccagtaaggatcctgtgggaggagcattatagcaaagatctggagacagatggtttggattcaaatcccagctctcttatttactagctgtgtgatgttggacaaataacataacctgtgccccagttttcttatctgtaagatgaggataccccatgagcatactgatgatgcaacagattaatacatgtaaggtgcatagtgagttttcaaaaatgttggttatcattattttctttgtataaatttatgggatacaagtgtaattttgttacacgcatagatttcatagtggtgaagtcagggcttttagagtatccaccatccaaatgatgtacattgtaaccattaggtaacttcttattttccactgtccttctactccctcagccttcccagtcttcatcgtctatcattctactctctatgtccatgtgtccacattatttagctcccactgataaacaagaacatgaggcatttgtcttttggtgtttgagttatttcacttaatataatgacctctaaaattaataataaaattatcatttattttcttgtcacaggaaaatgataaaggagggagaagaaagaatagcaagagaaaaaggaaaaaagtcagggcagggctagtttgcagaagttatcaagaaggagaagacatcaattagaaaacaaaacttgccaagaggaagatgaacaacgtattagagaccgggtgcggtggctcatgcctgtaatcctagcactttggcaggctgaggcgggtggatcacctgaggtcaggagttcgagaccagccagggcaacatggtgaaaccccatctctactaaaaatacaaaaattagccaggtgtggtgatgtgtgcctgtaatcccagctactcaggaggctgaggcaggagaatcacttgaacccgggaggcagaggtttcagtgagtcaagattgcgccactgcactccaacctgggtgacagagtgagattctgtctcaaaaaacaaaacaaaacaaacaaacaaaacaaacaaaaaaccaagctactagattggataggaacattttagggatattcgagagcatactttgaatagggtagtcaggaaggaaaccacactccaaagggaaaaggtgagagtgttcagagcagaagaaagaggaggagaaaataaccaattgttgaaccaagtggtccctgactgggggataggttaagcctcagtcattgttacagtcacacatacctggaagaagcaatggtccctgcatttctgtggtacgggtatcccacgccagccagccctggaagctctctactgtgccgtaagccaaccacctttcctagctcaagaaatcccatgagaattgaagtatgtatcttaggtcagctgactcatgaaattgctatcagaaaagcaaactgcttcccctctttcgccatcagactcatggttctgcttttcgtttatttgctgtaccttttctgcctagctattgttgatcacctttgggatgattgagttggtaaaccctaacgaggaaatgccctgaaagttacatcacattgtctgaggattaggaagtgcctttggggccaaaataaatcttaaataagcctgtggctttgaggtgagtaaaccagattttagggtgtctgtgttggtatctgaagtttccagaggagtcattttaacatatctttctcttcccccagtagatgatacttactggttatgattgctgagccataagaagttaagagtcccaaagtctcatagaaggtaatacattatttggttatttggaccaaccctaaccagtcacaggacttgggagaaaaagtctgtaaatctacccttcctccagcaaatatttatttatttatttatgtgggtcttgctctgttacccaggctggagtgccgtggcacaatcatagctcactgcaacctcaaactcctgggctccagcgatcctcccacctcagtcctctgaatcgttaggactacaggtgcatgccaccacgcctggctaattttttttagtttttatttttttttttgaagagagacagggcctcgctttgtagcccaggcttgtcttgaatttctgggctcaagcaatccttctgcctcagtctcccagtgttgagattaccggtgtgagccactgcacccggctcccctgcttaaaactcttctgaagctcttcattagacttaaaacaccagacttcctactgaagcagtgttgttgtctggggttcatcctctcatgccaagtaaatcaaggatgcggatgcacaagaagtgaatttaaggccgagcactgtggctcacccttgtaatcccagcactttgggaggctgagacgggcggatcacctgaggtcaggagttcaagaccagccaagccaacatggtgaaaccctgtctgtactaaaaatacaaaaattagctgggcatggtggcgcatgcctgtaatcccagctactcggaaggctgaagcgggagaattgtttgaacccgggaggcagaggttgccgtgagcgaagattgcgccagttccttccagcctgggtgacagagtgagacttcatctaaaaaaaaaaaaaaaaaagtgagtttcagagcagaagtttaacaggcaagagaagagaaaaaagagaaaagctctatcctgcagagagagaggggctcccaagtgagtcttctggtctcgtggtgaaatacatggggttttatagccgagcttgaggaggagctgtctgatttacacaggaaccgagagattggtcggactgggtgtgctgtttgcatagcacgcaaagaagctggccgccccatcctcatcttttactatgcagatggggtctctacctggctggcactatgttgcctgcttttttactgcacacgtggtgataaagaaaagggaacatggtgaaaccccgtctctactaaaaatacaaaaaattagccgggcgcggtggcgggcgcctgtagtcccagctactcgggaggctgaggcaggagaatggcgtgaacccggaaggcggggcttgcagtgacccgagatagcgccactgcagtctggcctgggcgaaagagcgagactctgtctcaaaaaaaaaaaaaaaaaaaaaaaagggaagagggaacctccatgttgaacatgcctgcccccaggaagccttttcctattggcacagccgctgcatttacctttgcaaacttccagcttgcttatttatgtttgtagctcgattttgcagactgctctttgtcgtggtggtgatgatgatgatggtgataataacggttgtggtggtgatggtggtaatcatggtagtggcaggagtgatggtggagctataggtggtggtggtgacgatgaaggaagggatgatggtgatgatgacgatggttgcgatgatggtgaagatgatgaaagtgacggtgatggtagtagcgatggtgatggttacattatggtgatattttcagagatggtggtgatgatggtgattgaaggtgacagctgcagtgaaggtgattgttgtggtgatggtgacgaaggctgtgatagcagtggtgataatgatggggtgaaaatagcaaaggtggtggttatattggtagtggaggtaaagacgaaaagaaatgattttggggctgctttttgttaacagggaagccttactgaggactctcttaccctcaccagttgcctgaataatatctttttagctcttgtatcactagatacaacaggaacaaaaaggaacaaacaaacaggcaaacaaacaaaaaaaccactgcaagaaagtagccctggtggcaactgaagacacggtcatggattaaatcatttagggagagattatagagtggaaaaagaaccctgagtaattcatttaaaaactcaggcaatgttaatttgtgcaaaggcaatagaaaaaaattaaaaaaaataaaggaatggagaggcagctaatagaggagacaggacgagaatggccagagagatgaggggtgggggtgggaaatgaatggagtatggtattatggaggtaaaggaaagagatcacactgaattaagactgaaagacacccacaggagagagctgcaagggggttgtttgtattcttagcatgaacaattacagtagtgaaggtggtggtggtggtgatgatgctgatgctgatgatagcggttgtggtggtggttgttatatataaagtttcggtgacgtgaaagaaatagcacttgaatataaaattttccttttaattctcagcaaggcaagttacttcaatatagaagggtgtgcccttacagatggaacagtggcgagcgcacattcggacatgggaggggaaggggttcttatccctgactcaggtggcccctgctgctgtgtcgttcccctattggctaggattagaccgcgcaggctaaactaatgccgattggctaatttaaagagaatgacggggtgagtgctttggcgggagtcagggcagagcaggtagcaggtaatcggaatgagttagggtggagcaggtgatcagaatgagtcagggtggagtaggtaatcgaaaaagctgctttacgaggaagttaagtttaaaagtagaaggcaaagaattgaacatactgacatattaattctttgaaaataaatttagaactcatatctaacatggtgatgatgatgatgataataacggttgtggtggtgatgatgatggtgatagaatggttgcagtggtgatggtggtcatcatggtagtggcagtagcgatggtggtggtagaggtcgtggtggtgatgacggaagtgatgatggtggtgatgatgatggttgcgatggggctgaaggtgacgaaagtgacgacggtggtagtagcaatggtggtggtaacatcacagtgatgttttcagagatggtggtgatgatggtgattgatggtgacagttgtagtgaaggtgactgttgtgatggtgatgaaggctgtgatagcagtggtgatgaagatgggagtgaaaatagtggcggtggtggttatgttgatagtggaggtaaagatggtggtgatgccaataatggtagggaaggtggtggaggttgttgttataatggttcaagccagaattatgtggattgaggaaaaagcgcgaggggaagaagtggagacagcaagtgaagtcacctgtaaagacagttggagaaaaaagtatgagcaaagcaagatgatcaagagacctccctgggtgtttggagcatggtggaattagctggctattgggattgtcaaggccatgaacgtacgtagtaggtttgttgggctctcaacatcctactgtcccagcatgcatgcagtgaggcttcctgatctttctccctagtgatcgtctaggggtggggttgtagaggcaagagttgatcaagagagacaggtggtgctacctaatggtcaggccaaagtggttcacatagtttggatgttgttccctctaactctcatcttgaaatgtaatccccagtgttggaggtgcggcctggtgggaggtgattggattatgggggtggatttttgatggctggtttagtgccatttcctcggtgctgtcctcatgatagtgagtgagttctcatgagatctggttgtttaaaagtgtgtgactcctcccctcttctctcttgctcctgccctcaccatgagacacctactttcccttcaccttctgctatgattggaagcttcccaggccttcccagaaaccaagcagatgtcagcttcctgtaaagcctgcggaaccacgggccagttaaaacacttctttatcaattacccagccttggatattcctttgtaacaatgcaagaatggcttaactcagtagttatgctattacagaatgttggctgcagagtcagaatccctgggttcaaatcctggctctgccactgattagctgtgtgactttgggaaagttactcaacctctcttttctgcaggcatctctgatctgggataactgcaatagtctcgtaactcgttgtccttctgtcccatcctccaccgtgcagtcaggacagttttctgaaagatgattctgggcccatcacacctctgcctcacaaccctgtgaatatttcacaggctaaatgcacttacttagtaggtgcataaatctcaccccactctggtcccactccacttctccagcctcatttcctacccttctgcttcagcctttccaccttccctgatacattttctgtttccctaaactccacattctatttgtagcctttcatgcctttgtacatgtgattctctcaacctggaatgcccccccatttttttttttttttgagacaaagtctcactctgtcacccaggctggagtacagtgacatgatcttggctcactgcaatctccgctccccgggttcaagcaattctcctgccttagcctcctgagtaactgggactataggtacccgccaccatgcctggctaatttttgtatttttagtagagatggaatttcctcacgttggtcaggctggtctcaaactcctggtctcaagtgatctgcctgccttggcctcccaaagtgctgggattacaggtgtgacccactgtgccccacctggaatgccctttctttttctttcttgccactctactcctggccacgtccttcaagtggcattcttttgcatgtccttccatgataaactcttgtgaaaggaaaataaagtctcaggactccaattcaggaataaaattaagctgaaagcggagtcaagcagacagctacagataaaaggccagatatcttcacaggtagctactgtatattcattttatcttacataaagtgccgatttactgagcacaaggtgaatacatcattgactagtcccccacctgctccttttatctctggcaacacattggttcagtaatgtgaccaaactctccctctttcccctccagtctgcttttcccccttaaatattgaagccctcaaaattatctttggagaaacaaacagatgatagtatgtttttctgtgttcctttcttccaggcatgttcttgaccctagcaaaataagcttctaaattgattgagacctgtctcagttacttttggtttatactctccactgtgcccttccctgcctctaagatagagttagcttctctcatttctctgttcatatcctatttcatcaaatctaaagcattattaattttaaggtacaccattggccgggtgcggtggctcatgactgtaatcccagcactttgggaggctgaggtgggcggatcacttgaggccaggagtttgagaccagcctggccaacatggcgaaaccccatctctactaaaagtacaaaaaagtagccaggcgtggtggcacgcacctgtaatcccaactactcaggaggctgaggcagaaggatcgtttgaactcaggaggctgaggttgcagtgagccaagatggtgccactgtactccagcctgggtgacagagtgagactccacctcaaaaataaataaataaataaaggtacaccattattttatgtaccactacacctaaccattaaactatgatacaatgctttattattctttataaatttttattttattcttgaatgagctataatagatttatttagaaatgaatatttatcatgcatggctctgttgcatgcatacaaaagaaactagcagcgggaactaaatttgttaagatgttcttgaagcttcttcatattcagaatcttctaaattactttcagcacagtcattggtgcccatgtttcaatttccatgtttctctatgtcagtagttctcaagatgtggtccccagatcagttgcatcaatattgtctgggaatttgttagaaatgcagattcttgggcctggtgtggtggcttatgccggtagtcccagcactttgggaggtcaaggtgggcagatcacaaggtcgagagatcgagaccgtcctggccaacatggtgaaaccctgtctctactaaaaatacaaaaattaggcaggagtggtggtgggcacctgtaatcccagctactcaggaggctgaggcaggagaatcgcttgaacctgggaggtggaggttgcagtgagctgagatcacaccactacactccagcctggggacacagtgagacttcatctcaaacaaataaataaataaataaataatgcggattcttggaccatatccagacctgctgaatcagaaatgttgagatagagcccagtgagtgttttttaacagaccttccaagtaattctgatacatgcttaagtttgagaacccagctttgcatggtattgttctctggaccatcaggagtactgtgatgtaggatttattcaaagaacccatgagagagccagaggccattgctagttctctgccatcctaacattgcttagtggggcacctgagaataaatcaaatgttttccaactgtgatgacaaatgagattataattccttttcgtaaccaaattattgtggtataatattccaggggctttcttgctggaaatctaaaagtgtgttctcagttatctctgagagtttctcacaggttcacctcatagatgtccctgaatagccctttccatccttccatgcatccatccatgcatccatccatgcatctatccatttatccatccatccatccatcatcaatccatccatccatcatgcatccatgcatccatccatccatccactcacccagccatctacctttcatccgttcactcaccgacctattcttcttttcatccaccaacccatttatgcactcatccatccacttagtcacacactcaacttttcatcttgggtgatggaggttgggatgcttgtgattttggtgaggatagagattgagatgcaaattatttttggtgtgggatagaggctgggatgcacatggttttttagggggatagaggttggaatgcacatgatttttggggagttagaggttgggattcttgaggttttgggggatacaggttgggatgcatgtgatttttggggggatagagactgatatgcacatgcttttttggggggatagaggttgggatgcatgtgattttttgggggtagggtttgtaatgcacatgatttgttgggggtaagggttgggatgcacttgatttgtttgggggatgaggattagaatgcaccgaattggccaggctccgtggctcacacctgtaatcccagcactttgggaagccaaggtgggtggatcatgaggtcaggagttcaagaccagtttgggcaagatggcgaaaccctgtctctaataaaaatacaaaaaattagccaggcctggtggtgggcatctgtaatcccagctactcgggaggctgaggcaggagaatcacttgaacctgggaggcggaggttgtggtaaaccaagattgcgctgttgcactccagcctgggcaacacaagctccctcccccccgcaaaaaaaatagaatttaccgaattttgagtggagtgcagctttcataatgcacatgatttttgggtggggtttataatgcacaagatttgctggggggcagggtttaggatgcatttgatttgttggagggataagggttaaaatgtacatgattttttttttcttgggtgcagggagtgggatgcacatgatttttgaggcatagaggttgggatgcccatgactttgggggtaggggttataatgcatgtgatttcttacagaggggttactcctagaagaagagaactgaagaaggataggacagaggaaggagctgaacaaggaggtagtcttagcaagagtctagcctcagcctaatcccatggggagctctggactgtgcaccatggagttgatccatcttgaggcagggcccttatacaaggcccttatgtcaatcaatcattggctgtggctgccctgggcgtgggtgcaagccaaacctcacaggtaaatgaatgaatgcaaccatgaagagcaactgggtggagctccaggagcatcaactgcattgctcaaacctttatctgggtcatgctcacccactgcctcaaacgttgctacacagagtatgaatgtcacttcctcttcattttaaagtgttcaaaataacaattctcattagccgtgttgcaacatcacatgataaatatgggggtgagcagcttccacatgattctttttttcaatttctgttgttatttctcattgaaaaaataagaattgtatatattgatggggtactatgtaatgtgttgatatatgtatacatgtggaatgattttaccaagtgaattaacacattcattacttcacatacttatatattttgttgtagtgagaatattaaataagtaaatatatatatatatatatatatatattttttttttagagacagggtcttgctctgttgcccaggttggagtgcagtgatgtgatcatagctcactgcagcctcgaactcctgggatcaagcggtcctcttgctccagcctcctgagtagctgggactacaggggcatgccaccatgcctggcatatatatatatatatatatatatatatattggagatggggtcttgccatgttgcctaggctggtctccaactccagagctcaagccctcctcccacctcggcttcccaaagtgctgggaatacaggcatgagtgactgcgcctggccaaaatgtattttttaaaacaattttcaaatatacaatgaattattaactattggcaccttgctgggcaatagatcttgaaaactcattcctcctgtttaactggaacttcatattctttggtgcaagtaatgcttaattctttttttatattttgagacggagtctcactctgtcaccctggctggagtgcagtggtgcgattctcagctcactgcatcctctgcctcccagtttcaagcgcctctcctgcctcagcctcctgagtagctgggattacaggtgcccgctaccatgcccagctaatttttgtatttttaatagagacggggtttcaccatgttggccaggctggtctcgaactcctgacctctagtgatccacccacctcggcttcctaaagtgctgggattacaggtgtgagccatcgtgcctggcagtaatgtttaattctcgacaggctcaaagatgatcatggcagccagcttggtagtcaggttgaatttatttaagtgtcgatccctacagagaggatgctgttgatccctcacccagatcccgttttctggtttattttctagaactatttccatgagaaataaaatcaaattttattaatgtcaagaaagtatttctttgccctaaggaacaaatggattgttctgtagggactcatcccccagctgttgtatattagttgctatcagtcacggctgtctgatatatcaacctgaaataatcaaaagcaccagattccagttttaaagagcttattcaagagaaaatccatgaacagccactctgggatgcacaaactctagagaaatggagtcaatgctctgaagttagaagctaagttcttgcttgtataggaagacaaagaaatttaacaggattacattttctatacaaggctggtttatgagttataacaaattaattagttgcagttttttttctgtgtgatttgttttctttttgttgtagctgcttttcattttctttccaatttaaaagtgtgtatttaacattccctctaaaggcagtgtaatagccatgaagtccttatgtgagaaagggaaaagggaagttattttttactgaaagtcaacagcagagaaggaagggtcttccctggctcttcaaccacctgtaacattttacaaaacagtgccagtaaaggaaaaggtttaatctgtaatcagagaaacaaaagctatggcttcctgggtttgagctgcctgttacgtgactcgggccctgtaattcacattcctttaaggccctaaataatttaattgagttccaacagcttaattttctttttatttggagatggattctcactgtcacccaggctggagtgcagtggtgtgatcatggctcactgaagccttgaacccctggactcaaatcgatcctcccaccttagcctcctgagtagctgggacaacaggcatatgccactatgcctaattaaatttttttttttttttttgtagagacagagaccttggtacgtggcccaggctggcctacaactcctggcctcaagtgatcctcccacctaggcctcccaaaatgtcggtattacaggcatgaaccaactgtgtccagccccaatagcttaaattttgaatgactaattttatgcctccttcagataattgctgcctcagctgaacaggagttgctctgggaggttatgatcccccacccttaggaggcatcttgcagccaatggctatccaagatgggggtacaaaatgccagctcctttcctcaaagtagaatgggaccagttctgtgtctcatactccagagctccctatgagattaggttgaagcttgactccagctgagcccacatctttgttcaactccttcctttccttcctaccctgctttccttactccctctctcccaagagcaccccagcaaatcatgaggacctaccctcctcccagggattgcgacctaaccaaattcctcccttatttggttatgtcatcaacacaaaagaagaaataattcaagtttcctaacactttctggttttatcctgagatgagatttaaaaatataatgcttgatttacagtaagacacaaataagatccccattatcaatattactttattgatgatgatgataataatgatgattgagtcctatttcagagtgcttaatttctttttgaaattgagatagagtctttctatattgcccaggctggtcttgcacttctggcctcaagtgatcctcctgccttggcctcccaaagcactgggattacaggtgtgagccaccgcgcccagctcagagggcttagtctttacattatagtgccatcttctggtaagattaaagaaaaagaaatccaaagtagcttcaaatgctgggctttaagaagctgggttgaagtatggatgaaggtctaaattttccgggtatgaggagttaaggcaaatcctacagagatattaacttgttcttttttacatcaccttaaatctattattgtatctttattattctgggacattcaggcccaaagatactcattaagtcagtaagctaaatttagtgacaagtgcatgagaattagagttaggaagcctgatcatgatatttattcactcatgcatttgtgaacccatccatccatccgacaaacgtttaagatatgtggtctctgtgctcggtgatttcatgtcaggttgattcattttactcagtgtttactttctcacatttaaaatggggttaacaatggaaaacagcgtggcgattcctcaaagacctaaaaacagaaatactatttggcccagcaatctcgttactgagtatctacccaaagaaatataaatcattctatcataaagacacatgcgcatgtaagttcgttgcagcattactcacaatagcaaagatgcggaactaacctaaatgcccatcaatagcaggcgatataaagaaaatgtacatgcacaccatagaacactatgcagatgtaaaaaagaatcagctcatgttatttgcagggacatggatgcactggaggccattatccttagcaaactaacacaggaacagcagaccaaatactggatgttctcacttctttttttttgaaacggagtctagctctattgcccaggctggattgcaatggtgcgatctcggctcactgcaacatctgcttcccaggttcaagtgattctcctgcatcaccctcccgggtagctgggattacaggcgcctgccatcatgcccggctaatttttgtatttttaatagagacggggtttcaccatgttggccaggctggtcttgaactcctgacctcaggtgatccacctgcctcagcctcccaaagtgctgggattacaggcgtgagccaccatgcttggccactgactcctttcttactcctggctttgttgagttatagttgacaaataaaaattgtatatatttaaggtgtacaacttgatgttttgatatacatacagtgaaataatgaagcaattagcacatccatcgcctcacatatttgcttttttttttttggtggtaagaacacgtaagacctaccctcttagcacatttcaagtacataatatgttcctgttaactacagtcaccatgctgtacattagatctccaaaacttatttatctgaaataactgaacctttgtacattttgttttttaaatgatacatttcttttatttttatttttagagacagtgtcttgctatgtggcccaggctggtcatctggaactcctggactcaagcgatcctcctgccttggcctcccaaagtgtgctgtgattacatgcatgagccaccccgcccggcccaacttctttgtaagaacatttagcttaaaacacagataaattgtactgcataaaggtattttctttctttatatccttattctataagctatttttcatttttttttttgagatggagttttgctcttgttgcacaggctggagtgcaatggcaagaccttgggtcactgcaccctccacctcctgggttcaagcaattctcctgcctcagcctcccgaatagctgggattacaggcgcatgccaccatgcccagctaatttttgtattactagtagagactgggggtttcatcatgttggccaggctggtctcgaactcctgacctcaagtgatccaccagcgtcggcctccaaagtcttgggattgcaggcgtaagccaccgcgcccggtcttttcatatttttaaaacctttttaaatgtgagtaatgtgttgcactgcaacattgtgacagttacaacatcactaggtgataagaaattttcagctccattataaccttatgggatcacaactgtgtatgtgtttcgtggttgaccaaaaccttgttatgtggtgcatgactgcacatgtgcttgatatataaagaataccagggaactagtgacagtggttgtttcaggggaggaaaatttaggaatagagtgagcctcccgtttgaacttttcccataggtatgtactatgtatactacataataaatagtttttaaaaagtcagatctatgtcttagattcacacatcttatttttagtgagaagggcaagctgtagaagaaacaaaaatacatcgtcctatttttagaataaagacagttagttgacccgtgaacaccaagggtttgaactgtggctatccccttataggtagatttttttctacctttgtcctccttgggacagcaagacaaacccctccctttcctcagcctactcagggtgaagctgacgatgaagacgtttatttatgatctttacgatcacttccacgtaacgaagagtaaatatattttctcttcttcatgattttcttaataacactttcttttctctgagcttagtttattttaagaatatggcatataatatacaaaatatgtgttaactaactttatgttattggtaaagcttctggttaacagtagtctattagtaggtaggttttgggggagtcaaaagaagtgaattttccactgcacagggtggcgccccaactcccgttgcctaagggtcagccgtataaaaatatacaaaaacaatcttaagtatgggtatatttttgtaggggattggattaagcccatggataaaggtggaaggggttggggaaaaggaaggagaaaagggtaagttaaatattgagcatccctaaagagacccggggaggggtcgggtgtgcccctctcaacccttgaagcccaggtcccctcatcccgccttccgaatgcaagttcagctcccattcccaccccaagcacaagccccgccccatttttgcccctgaggcgcacgacccgcccctactaccaccctgcaaaccaaggccccgcccactccgccattggggtgcaagccccgcccatcagccatcggagggcaagccacactccaccccgcccccgcgcacaggccccgccccacttttgccccgggacctaagccccacccctatccctgtctctcggacataggctccgcccccagcaccaccctccatgctctgtgggaccccactccagagcctaacctcatcccccgggtaagaatactagaatttctccttggaggctaaagaagacgttagtttctctgccgccgcctaaggctaccctggccacaacagcctgagccacagccacttccgttcccggcggccccgagaccggaagcggaagtgcgcgcggcggcggccgacggcggctgagctgtgctgcgcggcgcggcgcggtgcggcacggcacggtgggagtgtctccggctggcttgcaggtgtggcccggcccctcgggagggcggggagggcggggagggctcggctggcgcggggagggactggagggcctagaacagctccgcctgtgtgaggggtttcctccctgcgatcagccggtggccggcgtgaggcccacacagtcagggcctcgcatctgggcgcccgccgcccggtctctcgctctcaggtaccccccgtccgggcagacagggctgtcatcctgtcaaaagggaaatcccaaacagtccaggtcccacagctcagaaatgtggtgacaccggccccagctctcacctgtccttcccaatttttagggaaagtgcataaagacggccctaccttgcctacagtatgcaagataactgcgaattagtaattcacgttttatttgatatgatacttaatattatctagctttgcaactggaaagtgaggtctgggtccacatgtgcaaactggtttaattgattggccaaatttacttaaaaaattgaatgcatcctccattaaggaatgaattagatgacgagagatttcttttggagactgacaatttgaagtcttttagcttaatatctgttagcttggctttgcatctcttccttttccataactttttctttcttcttttttttctttctcataagaaagcttttggccaggcttggtggctcactcctataatcccagcactttgggaggccgaggcgggtggatcacctgaggtcaggagtttgagaccagcctggccaacatggtgaaaccctgtctttactaaaaatacacaaattagccgagcgtagtggtgggcgcctgtaatcccaactactcgggaggctgaggcaggagaatcgcttgaaccccagaggcggaggttgcagtgagctgagattgtgccactgcactccagcctgggtgacagagcaagactccatctcaaaaacaaaaacaacaacaaaaggaggagttcttaattttttttgtttttgtttttctttattttctatgtttgagacgacttttacttctgctgtgggcatcaagtttctcactgttaggttaagaaaagccgtttctcagttatttcacaaatattattatcaagaaaacctaagactgttattcagatcttttcaagttggctccagtccttcccccaagcatgtgaatcacagagcttcaaaactaatggaacttcagggaaaagacgatataaactttgttaatactggaaattcaaattgagttggccataagtgggatgtcttttttaataatggggttaaagctcgtgtctactgagaaatcaggaaaaaattaactccagaggaaaatcatgcatcagatttcagttttacgagtgaggtgtttgtttccacaaagaatatatgcgcttgccttgcctttttaaaaagaattaatattgtttcttaaaggtacctgaaacttgtgtgattatgtcttatgaaagacaggcactttaagttattcttatatttgatttttatggtgtcatattgtcttttttttttttttttttgagacagagtctcacttcatcacccaggctggagtgcagtggcacaatctcggctcactgcagcttctgcctcctgggttcaagcaattctcgtgcctcagcttcccaggcagctgtgattataggcgcccgccaccatgcccggctaatttttgtatttttagtagagacggggtttcaccatgttggccaggctggtctggaactcctgacctcaggtgatccacccgcctcggcctcccaaagtgctgggattataggcgtgagcaaccatacctggcctcatactgtgttttgtgtgtgcgtgggcatattccttcttaggctagctatactgagtcattcttgaggagtgttgattatttggcatattttcactggggtgccctcaatgaattggaccctgtacatggggaaacagtgggactgaaatagttacagtgcttgcccctgtggaggctttattctagctaataatattggtaaattaatagtgccaaaggcaatatgagaacgtggaacaggagaacttggggaggatgtcaggaaacacatctgaaaaggaacaaatgtttgaaccttcaagatgagttgtacgtagctaaacaaggggtctagctgtggagtggggtagcggaggaaacttgagagaacattccagatgtacagtctttcaggcagtacgaagcctgctgtgttccaggagctgagaacaggtagagaaagctaaagtagagaaaataaagtactgaatggatgagccaggtgagagagggaggcaggtccctgaagatcatggttagcattggatcttctttttatttattttttttctttcagacagagtcttgctctgtcacccaggctggagtgcagtgtgggatctgggctcactgcagcctccacctcccgggttccagcgattttctggcctcagcttcctgagtagctgggattacaggtgtgtgccaccatgcccagctaatttttgtattttaagtagagatggggtttcaccatgttggccaggctggtcttgaactcctgaccccaagtgatccacctgcctcggccttccaaagtgctgggattataggcatgagccaccgtgcttgacctggaccttattctttttttttttttcttgacatggagtcttagtctgttgcccaggctgcaatgccgtggcacgatctcagttcactgtaacctccgcctcctgggttcaagcaactctactgcctcagcctccctcccgagcagctgggattacaggcgtttgccaccatgcccagctaatttttgtatttttagtagagatggggtttcaccatattggccaggctggtttcaaattcctgacctcaagtgatccacccaccttggcctccagcctgagcaacagagtgagactcaaaaaaaaaggtttacatcacagttggagagagagaggccaaaatcgtttaagaaataaatatcaaatcacaccttcatatgggcagtggaggaaaagtagaagatcttagaagtattttgagggaagctagaagttaaaatgttcctttgatgacatgggaagagtcagtagcagtcactagaggctgttgtttgaaaggtgccttgggggccaacatgttgcttatggagataaatgtcctgtaagggttttgattgtgaccactctgctggagatcccccaaaatgctctgcttccgtcctcaccccttcttttacctcagtgtctcctttattgcagggagaacaccgactgagacctcaaaccctggctccagtgtcatggtgaggaaactgggggctcctgtggctgaaggggtggatatgtaggataactatgtcctctgggccctgtcttctctctcgccacttccgtccccaactgaggaagaaagggaagggtgagtgaggagcatcctcatccctgccctaggggacctagggacttccttctgtgcctgacctctagaggtggcatggaagaagagtcccacagcagaccctggggctctgagcggagctcctccagggccatccttgtcatccctggtgagacctattgaaaacacatgtggccatagaaatataaattcagcttaaattaattaagattcagtacatttagccgggcatggttgtgtgtgcctggaatcgcagctacttgggaggttgaggtgggaggatagcttgagcccaggagattgaggctgcattgagctaggattgtgaccctgcactccagcctaagctacagagtaaaaccttgtctctaaaaaaaaaaaaaaaaaaaaaaaaattaaaaagtttaagcgctcagtttctcagtcgccccagtcacattgcccaagtgctcaacagccacatgtgctggtagcccctttctggaaagcacaggcatggaacattcccatcatcagagagtgatgtctgttggacagcactgctctgaagaattctgcaattaaaaggattctcagatgaggccgggcgtggtggctcatgcctgtaatcccagcactttgggaggccgaggcgggcagatcacttgaggctgggagttcaagaccagcctggccaacatggtgaaactctgtctctactaaaaatacaaaaagttagctgggtgtgtggcacgtgcctgtaatcccagctacttgggaggctgaggtaggaaaatcgcttgaacccaggaggtgaaggttgcagtgagccgagatggcgccactgcactccagcctggacgacagagcaagactgtctcaaaaaaaaaaaagaaaaaaagaaaaagactctcagatgcaatggaagtcctactttcacaagtatataattaaggacgtaagtcttgggggatcccagggacttcacagaaattaagctttcaatcccaaatttgtgatgctgtgccaatttgtaataaggagtttaggaaaaactctctaagcagggagggacaggctctgccatcacaagtcagtggagttacacagagagccataactttacactttaggatttatccaaatgttaaaagaaagtaaacatttcagcttggtggcccatgtgatctctgtcacaactattcagttctgccgttgtggcctcaaaacagccattgatgcattgtaaataaatgcacgtggctgtgtgccaagaaaacattatttacaaaaataggctttaggctggattttccatgcctgctgtgtctgaacattttctcttctccagtgataaccagtcgttctgctcagtggtgggggtggtatttgccgagccagaatgtgtgtgctgttttaggaatccgtcacctttgaggatgtggccgtggagttcatccaggagtgggcattgctggacagcgcacggaggagcctgtgcaaatacaggatgcttgaccagtgcaggaccctggcctccaggggtaaggctggcgtcacctggctccttcctgtacgcaggcactaaatgcttcttaagcgcctgccatgtgaagaagacagacgtggcttaggctttgtggcacttagcgtccacaggatgacaaagcttcatctgttgcattgacttctttccctctgtagtaaggccctgtttgggtctccttgaatttggccccaggcttctgaggtgagacagcctcagccccttggggcagaggggagggtgtttgtgggttgggtcctgagttcattagctattgggcaagatccctttgctacccatcacacttgctcagcccagagaatctgaagcccatattgaagctgaaggagagtttgagttgagaaacaagagtttgttttcccctgcaagccctctctctctcagtgcctgtgtctttcttcatgtgcaggaactccaccatgcaaacccagttgtgtctcccagctggggcaaagagcagagccaaaggcaacagaacgagggattctccgtgccacaggtgttggtgagtaccaggcaggctgtggatcccccgacccccctggttgggtggtgtgccttgggaagtgtcaagagcattttcaaaggccctttgttctgaggggacatcgaaggccattcggagtgaggtttctcaagttcctttagcttctcttctattttcactttctagccctcctctcctactttcctttggtttcagaaaaagatttgttctaatttctcttaaaaaattagagggccaggtgtggtggctcttgcatgtaatcccagcactttgggaggccgaggctggtggatcacctgaggtcaggagttcgagaccagcctggccaacatggcaaaaccccatctctaccaaaaattagccggatgtgatggtgcacacctgtaatcccagctacttgggaggctgaggcatgagaattgcttgaacctgggaggtagaagttgcagtgagccaagattgcatcactgcactccagcctgggggatagagcgagactctgtctccaaaaaacaaaacaaagcaaaaattagagctataagtcacacaccatgaaattcacccctttaaagtgtgcagttcagtggttcacaaccttgtgtaaacatcaccactacccaattccagaacattttcatcacgccaagtagaaaccctgtccccatgggcagttactccccattacccctccctcagcccctggcagccactaatctgctttctgtctctatggattgtcctatatagacatttgtatatggaaatcgtatcataagtagcctttggtatccggcttagtataatagttttgtgttgcaagtaagttagactgggtagtttataaacaatagaagtttatttgactcctggttctggaggctgggaagtctaaggctgaggggctgcatctggtaagggccttcttgcagcatcataacatggtggacgagatcatgttgcaagagaacaagagaggcccagactggtttttacagcaaggccactcttgagataactaacccccttctgaagtaatcacagggcagattcctcgtgacctaatcacctttttttttttttttttttttttttgggacagagtctcgccctgtcacccaggctggagtgcagtggtacgatctcggctcactgcaacctctgcgtcctgggttcaagcgattctcctgcctgagtctcctgagtagctgggactacaggtgcacaccaccacacccggctaatttttgtatttttagtagagatggggtttcactgtgttggtcaggctggtcgagaactcctcatctcgtggtccacccacctcagcctcacaaaatgctgggattacaggcgtgagccattgtgcccggccacctaatcaccttttaaagttccagctctcaatactgttgtatgggaattgcttccaacccatgaactgtggaggacacacttaaactacagcagtatctgtcttctttcacttagctttatgttttccagatccatccatgttgtagcatgaatcagaacttaattccttttttaaggctgaataatatacattgtatggataagctatattttgattatttgttcatcagttgatagacagttggattgtttctactttttagctattgtgaataatgttgctgtgaatgtttgtgtacaatatttcttttttcttttcttttttttttttttttttttttgagatagggtcttgttctgtcgcccaggctggagtgcagtggtgcaatcataggtcactgcagcctcagccttttgggctcaagcaatcctcccacctcagtctcttgaatagctgggaccacaggtgcatgccctcatgcctggctaattttaaatttttttctagagaccattcttcctatgttgcccaggctggtcttgaactcctgggcttgggtgatcctcccaccttggcctcccagagtggtgggattacaggcgtgcgccaccgtgcctggccttgtgtacaagatttatgtagacatgtacttaattctcttaggtatatactgaggagcagaattgctggctcatatggtaatgctatgcttaacttcttgagcaactgtcgtaccactttccaacacaggtacaccattttacattcccaccagcggagatgagagttttgatttatccacattctcgcccatacttgtcatccaattcctctttaaatttaacctttttatgtatgttctttgtctagttctttcttactcttttttctaataacatctgctttctggaaatagtctcagtcctcatagaattcttagctaggaaattgcctctcattttcccctcattcctatgactgccagagtccacacatagccctacatacagatgctgtcttccctttcaggatcttcccaagtctaaggtcagtattaaaagctgggctgggcatggtggctcatgcctgcagtcccggcactttgggtggatcacttcaggtcaggagttcgagaccagcctggcccaacatggtgaaaccctgtctctactaaaaatacaaaaattagcctgacatggtggtgcgcgcctgtaatcccagctactcaggaggttgagacactagaatcacttgaacctgggaggcggaggttgcagtgagccgagatcatgccattgtactccagcctgggcgacagagtgagactccgtctcaaaaaaaaaaaaaaaaaaaaaattagctgggcatggtggtgcatgcctgtaatcccagctacttgggaggctgaggcacaagaattgcttgaacctgggaggtggaggttgcagtgagccaagatcgcaccactgcactccagcctgggtgacagagtgagaccctatctcaaaaataaaaagtaaagaaaacatgtggctcatgcctgtaatcccagcactttgggaggctgaggtgggtggatcacaaggtcaggagttcaagaccagcctggccaagatggtgaaatcctgtctctactaaaaatacaaaaaaaattagccagacgtggtggcgggtacctgtaatcccaactacttgggaggctgaggcagagaattgcttgaactcaggaggcagaggttgcagtgagccaagattgcgccactgcactccagcctgggcgaaagagcaagactctgtctcaaaaaaaacaaaaaacaaaaaacaaaaaacatgtatgtgtgtacacacacacaaatatagatatatatatatatatatatatatatatatatatatacacacatatatattttcaattttatgccactatttctttttgaaaggagtttattttttcccaattcatttcagactggaaatctcaacttgaatatatgtattcggtattaaaatttgaatatttatattcaacattaaaagaaaaagcctatgtgtgtatagtgtgtatatatattcacatatatatgtgaatatatattttcaattaatgtcactatttctttctgaaaggagttcattttttctcccattcatttcagcctgggaatctcaacttaaacccgaagagttgccttctatgcaggatcttttggaagaagcatcctccagggacatgcaaatggtaagatgcacggggttttccccggctcccagcatgggagaagttgaggaacacgtgaggtggaaatacaggaccagagccagggagatgttagcagcatgggtgtctcttggaagggaaacagtgtctgaggggagtgcctgtgacttctgaatttgggcaaacccagactgttgctcaagactttttttttttttgagacagagtcttgttctgtcacccaggctggagtgcagtggcatgatctcggctcatttcagcctccacctcccaggatcgagtgattttcctgcttcagcctcccgagtagttgggactgcaggcgtgcaccaccacgtctggctaatttttgtattttttggtagagacagggtttcactgtgttggccaggctggtctcgaactcctggcctcaagtgatctgcctgcctcaagattctttttttctagaaggtttcctgaaggaaacattttaataaatgtgagtcagacattgagcgtgcgaaatacgacttcctcctcagcaactgtcagaaaaacccctcctggtagagaagccccattgtgaataggaggcagccctgtggtagagctggcaacacactcgacgaactccagctgtctaaacaaggcatggcttgaaaatgctgagaatatgctcccggtggggaggacccctgggcactggcacagatattggcgagctttccaccatcattcacctctttttttggtttttaaaagacagggtcttgctctgccacacaggctggaatgcagtggcatgttcatggctcactgcagcctcaaactcctgggctcaagcgatccttctacctcagcctcccgagtacctgggaccacaggcctgagtcaccatgcccagctaatttttttctttttctttctttttttttttcttagagatggggtcttgctatgttgcccaggatgatctcgaactcctggcctcatgtgttcctcccacctcagccacccaagtagctgggactacaggtgtgagccagtgggcccagccattactcacctcttgtcaggagcaagctccacctggagaaaaggctcctgatgagttgaaaggaggcaggaaatgtttctggaggagctgtaacctggatgtgggtgagagaactggcaagacagaggccactttgattggaaagaatgtgggaaagttgttgggcatccttttcttcttaggagaccagtctagatcccacactggaaggaagcccttttcagtgtggaaaaagccttccatatgagcttgtacattaatagtacaggagaaaatatacacggagtccccaccatcccccctttggccctgaatttcctccgcctcaaacaagaggaccttccaaagtttgagttcccattcctgagtattggtgaaagttagagttagggtttggttagaaggaggcacagagctcagcctcacccccaagtggggcgtattagtcccagggtcagtgagaaccccgggatccctcagtcagtgccccttcccctgtgtcatggatgggtgtcagcatcagagcgtcagggatgccccacacagtggatggggtgcagtggcctcggttttagagacccacattcaacttctttgccagggaagcttctggaacacagagaagcctcaaccctgtgcagcttggtgtgggctgcagatcagccaaaactcacaacctgcctggctgcaacagacccctgggcagctgacagccctcctcactccccaggccctcctcgcccttggtttacactcttgttttggtggagaacaccctccagtagctccttgggatcaggtgcttgggttttgagaccttgacttctgagaatgtcttatcagggctgctggattgcaggttcctcatccgatgtggtggttgcggtaagcctcattacagaacatccttttttctttcttttctttttaaatagatatggggtcttgttctgtcacctaggcaggagtgcactggcacgatcatagctccctgtagctttgaacttattagctcaagtgctcttcctgcctcagcctcctcccgagtagctgggactacaggcacgcaccactacacctggctgattttaaaaaattgttttggagacgaagtcttgctgtgttgtgcaggctcccattgcagggcattctgtgtgtcatgtagcccccagtgcttgttgaatgaaggaaggaatggataaggtgttgcagaaggcatctccagttcccatcctccacctccatgtctctcttgctcagcaggtggaccccatgtgaagaaaggagagagggagggagaatgagcaacgagggcccggtgccctctttgtttctgtgggctctctcctttcagtacagggctccagtgccctccacagaactccacacccagcccagcaagcccctccataatgggtgctgagagtggcaggcatggggctcttgttacatcagagccccaggaaacaggcggtcacagactattctgagtgggcagaggaggtccacctatggacacacgtttagagaagctgaggagttcatccctgaagacatccagcccgtgagtagtagaggtgggtttggagctaggagttgaacccagacctaaccgcagagaccacagtctcagctgtcaggttctactgcctgacgatcatacaacctgctgctgggttgatggtgctgaccctttaggtagcccttccaggccatgccaggcatcattgtgccttgtcacaatcattgagaccctgtatggtggctccgagacctccctgtcacatgggaaaaagtgctgatggccagggacagattgagtccccatggcctccctctctttggtcggctggtccagcagagggaccagtgaagaggagggtgggaaactgctcttagaagagtcccaaggaagccaggcacagggcctcaccccagaatcccagcaactccggaagctgaggtgggaggaccactggagcccaggattttgaaaccagcctgggcaatatagcaagaacccatctctgcaaaacatacaaaaattagtcatggctaggtgtggtggtgtgcacctgtagttcagctacttgggaggctaaggcgagaaaattgcttgagcccaggaattcaaggctgcagtgagccatgtgtttgcaccactgctctccagcctgggtgacggagcaggattctgtctcaaaaaaagaaaaataaaactccccaagggaggctgaggaacaggcctctccaggctcagcccttcttctgtcccaggcccaccccacagctgcctcttctgcagacacctggctccttgaggctgcagtgttgctgctttcatcctctgctgcatccgcagggcctgcactagcagtgcccatgtcttagtctgttctcaccctgctgataaagagatacccgagttgggtcatctataaaggatgcaggtttaattgactcacagttcagcatggctggggaggcctcaggaaacttacaacatggcggcaggggacgcaaacacatccttcacatggtgggcagcaaggagaagtataaacaaaagggggaaaaaccccttataaaaccatcagatcgtggccgggcgtggtggctcacacctgtaatcccagcactttgggaggccgaggcgggcggatcatgaggtcaggagatcgagaccatcctggctaacatggtgaaaccccgtctctactaaaaatacaaaaaattagccgggcgtggtggcgggcgcctgtagtcccagctacttgggaggctgaggcaggagaatggcgtgaaccccagggggcggagcttgcagtgagccgagatcgcgccactgcactccagcctgggcgacagcaagactccgtctcaaaaaaaaaaaaaaaaaaaaccatcagatcttgtgagaactcactcactatttcgagaacagcagcatgggggtaactgcctccatgattcaattacctcccaccgggtccctcccatgacatacggggattatgggaactacaattcaagatgagatttgggtggggacacagccagaccatatcagcccagtacatatttgttcgacaaataggcagaacgcctaaaaacagtttctttaagttgagtgacctgtgtcaaaatgattctgatggaaacatttgtctcaaaatgtacccgtgggattttgatttatgacacagagaggccaatgtcattggaaaattttgattacttgtatttcctgggaggacagggcacaccatgccacacaggtccacacagggaagcaccaaggtcagcctggaggcagaaaggagcgaggggatagcccaggccagagcctttcttggagtttccacagggtaaaccactcaggatttgtcagtttgaataattttagtggaccttgggggataggtgctgtccctggttgatttagggcaggggaaatattggctgggtgagagtgagataaggagctggtacggcatgtgggctgtgggtcacgggatttggagatgaagttggcaggcagtttggccctgtgaatgatggatgccctgtggacaaggacagcattcctgttcagaaccaagatctcccgaccttgctttcttttttggtttttgggtgacttaaacagcagaaacttattttctcacccttatggaggctggaagcccaagatcaaggtggcggcagggctgggttctcctgaggactctctccttggcttgcaggtggccaccctcctgctgcctcttcacacggccatccctctgtgccacacctttctatagtgaaatgtctcatagcctcttcaggggctctgtcctaacctcaggtctgtctttgtatctgcagtgtgttcaagcctcgagaccctcggtggtagctggtgactgccgtaggtggggagtagttactaggtctgaggctaccagatgtcagacctgtgtaccctgactttttttttaagacacaatctcgctctgtcgtccaggctggagtgcagtgttgtgatctcagctcactgcaacttctgcctcccaggttcaagtgattctcatgcttcagcctcctaaacagctgggagcttagatgtacactaccacacttggctaatttttgtatttttagtagagatgggtgtattagtctgtgttcacactgctgataaagacatacccgagactgggcaatttacaaaagagaaaggtttaattggacttacagttccatgtggccagggaagcctcacaatcatggcagaaggcaaggaggaacaagtcacgtcttacatggatggcagcaagtaaagagaccttgtgcagggaaactccccttataataaccatcagatctcgtgagacttactcattatcacgagaacaatcatgggaaagacctgtccccatgaatcagttacctcccactgggtccctcccacaacacgtgggaatccaagatgagattttgatggggacagagccaaaccatatcaatggggcttcgccatgttggccaggctgctcttgaactcctggcctcaagcaattcttcacctcagcctcccaaagtgctgggattatgggcatgagccactgcacccatccccatttgccttgacttctggcagccctaagccccaaaccaaaggtctctcgggctgagaacagctgtggtgccaactctgtcctgctcagcaccctcttgtcttttgccaggggccggggctgttcctgaggatgcagctggtgccctccatagaagagagggagacaccattgactcgagaggaccggccagctctccaggagccgccttggtctctgggatgcacggtaagcctgggagaggttcactgtgatggcaccaggtgcagtcaggaaggcctggggtgtgggttgtctgtaaattgggggaggggagggaaaggagggtgtttggggcctgtaggaggcccaggctgtgggcttggggtggtggagtctgtttctgtgttgaatatacttgtccccagggtgatggcgggctccagggcgggtcctgggggagggtctggttgttggactgtaggccctgcctttcctggtccagccttttttcttcctgtccttccaccccagccccactgcttccataacctcgaaactgacaggaactggcaggtcctatgacctgagggctgggcaagggagcatccaggctcagggaagtgaggacctcttggctcagggccctgcgtgtccttaccaaggcagagagagaatgggagagagatgccgtaaggcaagggtccctaacccccaggccgtggaccagtactagcccctagcttgttaggaaccaggctgcagagcaggaggtgagcggcgagcatccatgcctgagctccgcctcctgtcggatcagcagcagctgatcctattgtgaactgtgcatgcgagggatctaggctgcaggctccttatgagaatctaactaatgcctgataattgaggtggaacagtttcatgctaaaaccatacccctaccctgctttgtggaaaaattgtcttccatgaaactggtccctggtgccaaaaaggttggtgactgctgctgtaaggcacgtcctgagccctgcatgaggagaaaaggcctcttcccactcgtccctgccctgttccctcccccgagggacctgctgcatgtaccccccaacctcccatccaccaccaagtcctgctagcgttatttccaaaatgtaacccacctccagctgcctctcctgtccctgctgctgccatcctgcccagagccaccgttagttctcctggactccagttctgctcctgacaggcacctgggctccaccctggacacagaggccagagggatcccttagaagtgcaagtcaggtcagacgtgtttcctgagcgagcagctgccagcagagaagagaccacatcctactccaaggagaggtcttcctcccagaaaaactcactgactgcctgctccgcattcacgcaggtccacctccaaactccatcttccctccacccctcaacctcctggccatccactccccacttttttcccagcttttccctgacttctggagcctccttggagggtgccaccttccccagcccctgcctgggtgccctctctccaggccattttggatcacagtgattagctttgtatttaaggattgggtaaatcctgacaaggtaaatgggtctctctcttcttttattaatatgttccccaaagcaggatcaaatatgcacgttcatttggggtgagcaggtgtgagtggccccctcagcttcttgactctaatctgtgacccctgtcactctgtccagggactgaaggccgctatgcagattcagagggtggtgataccagtgcctactctgggccaccgcaacccatgggtggccagggattctggtgagtgagtgctgcgtggaacacgtggccagagggccctgctgtccttgtgttctgtccaggaacttgtatcctatcctgcctgcatttcctctgactgcaggcactgccgtggcaccatagagaggatacagaaggcctctctcattatttgtgtgtttaagtgggagggcacttccagtgacagatctttaagaaagagagggctcactcaaccacagcaaaggccagacctctctttgggcaacatgaaattcttgactacacgataatgttgattttgaaaaattatgattgaatttactagaaatggcctgtgttttaactgtgtttttataaatgaggttcaggccggttgcagtggctcatgcctttaatcccagtgctttgcaaggcctaggcgggaggattgcttgaggccaggagttcaagaccagcttgggtaacatggtgagacccctatttctaaaaaaaaaaaaaaaaaaaaaattagctgtgcatggtgcctctcaagtcccagctacttaagaggctgaggcaggaggatcgcttgagcccaggaggtcagggctgatgtgaactacagtcgctttattgcactttgcagcctgggtgacagaatgagtccctgtctctaaagaaataggttcaaagccacttctcctgagaagtggggaagaaattaattctagaagacaaataacattttaactttaacagtaaggtgtttgttttcttctagttggccttctagtaagaataataagctttgtttcttttttttttttttttttttgagacggagtctcactctttcgcccaagctggactgcagtggcactatcccggctcactgcaagctccgcctcttgggttcatgccattctcctgcctcagcctcccgagtagctgggattacaggcgcccaccaccacgcccggctaattttttgtatttttagtagagacggggtttcaccgtgttagccaggatggtctcgatctcctgacctcgtgatccgcccgcctcggcctcccaaagtgctgggattacaggcgtgagccaccgcgcccggccataaactttgtttcttaaaagtgccatccactcttgtgtctggaatctctgttttcttcttgacagggaacaattcttagatctaagtcttgtgttgctcttcagtatatttttggtaagtcttctgggccaggctctattttgttacttcttctttttttattttattttaattgagacagcatctcgctctgtcacctgggctggagtgcagtggcacgatctcggctcactgcaacctctgcctcccgggttcaagcgattttcctgcctcagcctcccgagtagctgggattacaggggtgcgctaccatgcccggctaatttttgtatttttagtaaagacggggtttcaccatgttggccaagctggtctcgaactcttgacttcaggtgatccgcccacctcggcctcccaaagtgctgggaccacaggtgtgagccaccgtgcctgacctattttgttacttcttgaagcgggtaacaccactactgtcatccgatggtgagatggggaccaggaaacagtcacaaagaaaacaccgacccctcctccgtggagctcacggtcagctgggtggtcagagttcgaaatgaataacagagtccagtggaagtgtgttatacaaggacttcatctcaggggacgggagagttctgggaaaggatggatatttaagcttaggccagggtttctcaactgcagcactgctgataatgggctactgcagcactgctgataatgggcctgttcactctcagctgtgggccgtcctgtgcattataggatgctgagcagcatccctggcctcaactcactagatgctacgagcacttttcctctatgagtttgctagggctgccatatcaaagttccaccagctgggtggattaaacagcaaaaatatattgtctcaccgttctggaggccagaagctcgagagcaaggtgttggcagtgttggttccttttgaagcctctccttggtgtgtagatggccatcttctctctatatcttcacatcatcttccctctgtccatgtctgtgtccaaatgtcgtcttcttgtgatagggtttggatttgtgtccccacctaaatctcatgtcaaattgtaatctccagtgttggaggaagggcttggtgggaggtgactggatcatgggggtggacttcccccttgctgttctcttgatagtgagtgagttctcacgagatctggttgtttaaaagtgtgtagcacctcccccttcactctcttcctcctgctccagccatgtagcacgtgcctgcttcccctttgccttccgccatgattgtaagtttctcgagtcctccccagccatgcgtcctgtacaacctgtggaaccaggagccaattaaacctcttttctttataaattccccagtctcaggtagttctttatagcagtgcaaagcagactaatacgtcttgtgagtacaccagtcatattgggctagggcccgccctactgacatcattttaatttaattacctctaaagactctatgttcaaatatggttaccaggggtgagataagatactaggggttaagacttcaagatatgaatttttgaggtaatacaattcagctcataacagccacataccccctagtcatgaaaagctaaaatgtctctagatgctgcagactgaattgtgctccccttctccaagttcatgttgaagccctattgtctcccccgaaggtgccattggaaatgggacctctaaggaggtgataaaggttaaataaggtcataagggtgaagccctgaaccaacagaactcatgcccttacaagaagaggaagagacaccagagctctctcgcccatgtgaggacacagccagaaggcagccatctgcaagccaggaagggagccctcaccaggaaccaaccatgctggcatcctgatctcaaacttccagcatccagaactgttagcagcaaatttctgttaagtcacctagcgcatggtattttggaatgacagctcgacagctcaacaccagacattgccaaatgtcccctgggggtcaaaccctgacctagaccatgataaatactataacatttagcttggtcagctgttgggctgtcaggaggttcggagagaggatatcaggcttaggaacaacattgataaaattccccatggagcagagaactggttgcatccagggcccatggaagatggtgtgaaggcagcagggagaagtggagagagagtggtgtgagctgactgaagaagaagcagcttccagattgttcagggcttggaagtgcaggaaaagaaccttggcccatgttctaagcccgctgggagccagtgacgtgtttaggtgagtggtgcaatgcacctgtggttttaacagaaccgcaccccccagcccacctgtgaggagcgtgggctcagggaggaaagcagtggtaggtggaggccattaggagtagaatggtgctggtctagacttgggggttgagtgtggaggaggtgtgctgggttcccccaagaccaccccagtcttgatgatccactaggaggactcacaggagatgtcgtactcgtggctgtgatttattaccagaagtggatatgaagcagaatcagcaaagggggtgccaggtgtggtggctcatgcctgtaatcccagcactttgggaggccaaggtgggtagatcacttgaggctgggagtttgagaccagcctggccaacatggcgaaaccctgtctctactaaaaatgtaaaaattagccgagcatggtggtgcatgtctgtaatcccagctacttgggaggttgaggcaggagaattgcttgaacccggaaggcggaggttgcagtgaaccaagattgcgccactgcactccagcctgggcgacagagtgagatttccttcttaaaaaataaaaaaataaataaaagtaaataaaagaagtgtatctgactcatggttctgtgggctgtacaagaagcacggcaccaacatctgctcctggcgagggcctcaggctgcttccacttaggtcagaaggggaagggaagccagtgtgcggagatcacatggtgagggaggaagcaggagcgggggcagtgggggagggaagggaagggaagggggaaaggtgccaggctctttttaacaaccagcttccttggaaagtagtagaagagtactccttctctctgagggagagcgttaatcaattcttgagggatctgcccccaagtcccgcctccgacactggggattaacgttttggtgtgagttttggaggaaacaaacagtccctaaattccagactttcagaaggaaagcaggtgttcaacataaactgcattgtttgtacaagcagtttaagtggagcgagtttctcttaccagttaggggggcgggaaccttcctgaaatccaagttcccagactccacccaagggccaaccttgcaaacacatctcattaaggagcccatccaggcctgctgggttaacgcctttctgcacagtagggaagtgaggaatgatttaaaacacatagaggccagcactttgggaggctgaggtgggaggacttcttgaggccaggagttggagaccagcctgggcaacatagcgagaccccatctctacaaaataagaaaattagccaggcatggttgtgtgcacctgtggtctcgctactcaggaggctgaggagggagaatcacttgagcccaggaattgaaggctgcagtgagctagtccagcctgggtgagagagcaagaccctgtctcaaaaaaattatagtaataatgcatataaaacatttatattgaggaggttgagttgatttggtggttcatgtattcatttaccaatgacatggagcatttttgtgccaagtaaggtatcggggacaggatggtgaaaggcacccaggcttattcttacaaagcttccaatccagtgaggatgacagaaaagaaacactcatggcagcaatacatagctggttacagatgggtaagggctgcgaagaaagggaaggggtcctatcagagaaaaggagagaaggggctctttctacaggggaggagacctcaggatggggcactctgagggcgacgtttcagtggatccaaaaagaaaaggctctatgtaggtgttggctgtagcgggaatgggtgggagaggggcttgggggtgagtaccgccatgtagagacgtcatcactatttattctgattagttgctgggatctgtagagtgtcagagaggggtgagatttctgatcaaagacaggggcagcacttcctgagattgaggacatggttagggagagcaggctttgggaggacggtgatgagtgttttttttttttaagacatagtcttgctccgttgcccaggctggagtgcagtggtgcaatcttggctcactgcaaactccatctcctaggttcacgtgattctcgtgcctcagcctcccgagtggctgggactacagatgtgtgccaccacgcccagctaatttttgtatttttagtagagacggggtttcgtcatgttggccaggctggtctcaaactcctgacctcaaatgataatgctggcctctgcctcccaaagtgctgggattacaggtgtgagccactgtgcctggcctagtttttttgtaacagaaatttctctttcacaatttaggataccaaaagtccgaaattaaggtgtcgacagggccgtgctccctctgatggctcgggggggaggatcctgccacctgctttctaacagtggcctgcagcccttggtgctccttggcttgtggatgcagccctcccgtctctgcctgtgttgcctcatggctgtgtcacctctgtgtatctgtctctgtctcttctgttaggagaaccatcatattggattaagggcctaccctattctcctgtcgtctcaactcattacatctgcaacaatcctatttccaaataaggtcacattttgaagtactgggggttaggacttctcttttttggggggttcacagttcaaaccatagcagtctgttctctagtccccccaaattcatgtcctttccacatgcaaaatacactcacgtggtcccaaagttttaatccattccagcgtcaactctaagtgcaaaatctcatctaagcaccatcaactcaaagtttcatctcatctgatgagaatcccacaactcttcatgtcagtcatctacagcaggtatgagggagactcagagtgtggtccattgtggggcaaaattcctctccatctgcgaacctgtgagaaatcagaaagcaagtgatctgcttccaaaatacggtgatggggcaagcaaaggatagacattcccatttcaaaaggagaaaaaggggtcatgggtcctgagcaagtttaaaacccatcagggcaaatgctatgaggtttccaggcctggaacaaatcctctatggttggaagctctgacctctggacctcattttgggtaccttctattcctgttcccttagatgggcagaaagatttgagccaatggttggatacatggtctggtgttcagatgtgagagtcagcctggagatttgggcttcatcatgaagtttgggaattgacacccagagaatgggtgaggttgcacaccaaggcagagagaattgagggagacacgaagaggagggcctgcaacctgtggacgccagcaacatgttggagaagaagctcttacaggaaaaagaggaggctggggttgtgatcactgatcacaggctgggtgggctacaagaaggagggattggctaggtgcagtggcttgcagctataatcctggctactcaggaggctgaggtgggaggatcgcttgaggctaggaattcaaggctagcctgggcaacatagtgagacccccatctctaaaaaaataaaaaaaaaattaacagggtgtggtggtgcacacgtgtagtctcagctacttgggaggctgaagtgggaggatcacttgggcccaggagtttgaggctgcagtgagctgtgattgtgccactgcactccagcctgggtgacagagcaagactctggctcaaaacaacaacaaacccaggagagattggatgatgagcacacatcagtgggatttcccagcacggatggaggtcactggtgattccagggtggtgccagcccttggaacggtggagatgggaagcaagtgggaggggaggaagtgggcacagagggtagatagcccatgatagggaatgaagagatagaggtagcccaagggaaaagtggggtgttatggcttgaattgtgcccctccaaaaagacatgctgaagtcctaaccctgtgaatgtggccttattggaaatagggtctttgcagctgtaaccaagttaggaggtcacaaggttgggccccaatccaacatgactgtgtccttatgagaagaggaagacgccacgtgaagacagacacgcagggaggggaccgtgcgacggtggaggcagacattggagtgatgcatccacaagccaaggagccccaagtgtcgatggccgccaccagaagccagggaggggcaaggaaggactcttctcagagcgtcagaggaggcgtggccctgctgagcttaactttggactcctcgtctctaaaactgcgagaggatacatttctgtggttttaagccactcagtttgtgatactttgttacggcagctgcagaaaacacatgtggggtcagggattgggtgtgggtcaggtttaaaaaaagtgaggggaaaggtcccatcgggagggagaggtgaggatgcaggggatgagggatgatctgggagttgcttgcttgtctgtcataggccagaaggaggatgcctggtgcagagcgaggagtggtgttgatttgaaggcaggtgggaaggaagtttctttttaaggcagacttgcaggttggttgtggtttatctgcccttgatttgtggtaagtcctggagcaccactagccctgcagtgtagaggggcagagaaaggggccaggcagccggggaggaaaagctgtcccaaagctgagtcgggacagtggtgggggctgcaggagctttggagtctcctggtgaattatggagtctatggctcttgggatatggaatgaaggcgtgcgtgtgtgtgtgtgtgtgtgtgtgcacgtctatatgtctctttgtgtgctggtctgtgtgtatatgttatatatatgaacaggtgcatgtggtatgtaactgtgtatatgtgtgcgtgtttgtgtgtatatgtgtgcatgtctgtgtacgtgtgtgcatgtgattgcatgcatgcgtgtgcaagagcttgcagatatgtgtctgcatgtgtgtgtccctgtgagtgtgtgcatgtgtgtgtgtacacatgtgatcactcacagccagggtgggcagacttggggcctgtgagtgtgcccagtaggccaggcaccaaccctcatgcctcttcccttctcccctagctgtgcctgcacgtgaccctgcctggcttcaggaggacaaagtggaggaagaagctatggctcctgggctgccaaccgcctgttcacaggtaggtaagaacttcttgttctaaaagaacactgctgtgcccaaaggctggacttaccttcttcctgtgacctgtctggatcatctcatagggttggtctccatgctttcagggactgggcctcttgcagtgggtgtcagcaagggagcatgggccatgatcccaccacctcattcagaccctccccaggctgctgagcaccaggagggaaaacaaagcaaggatgtcagctgtcctcattttgtggtcttcatggtctcactgaacaaagagttgagtcattttccagatagttccctcttgcctgtaccatgctcaggtctgctggaccctggagctagaagggggacaaatctgtaagagcttcctggctccttgtcaatagataagtcctgtccagaggtcgaggacttgcaacattagttattgcctcttgctgttcttacttaaggagtggagagtagagagaggagttctagttcagagtcctgagctaagggccagattctgcgggatctcagaaccctgtctgaaagtcctctgcctgggttttcccttccccaggcttgccagcctccagcatcctctggcgtactggtgggggtggtccctggctgagccgggatggatgtgtgttttaggaaccagtcacctttgcagatgtggctgtggtgttcaccccagaagaatgggtgtttctggactctactcagaggagcctgtatagagatgtgatgctggagaactacaggaacctggcctctgtgggtaaggcagcttcatcttttctttccttttttttttttgagacagagtcttgctctgttgcctaggctggagtgtgatggcgtgaccttggctcactgcaacctccgcttcctgggctcaggtgatcctcccaccccagcctcccgagtagctgggaccacagggtgcatcatcacacctggctaatttttgtatttttttgtagagatggagttttgccatgtttcccagactggtctcgaacttctgggctcaagtgattcacctgcctcagccccacaatgtgctgggattgcagacatgagccactgtgcctggccaaggctttgccttttcatcacatttatgtaccaaccataagctctagaaattgtgcaagtctgggaaacctagtggtgaaaaaaaagataattcccaccttcatgagcttccagtctacttactggcctttctatggaatgaagatctttttactgccctgtctttctgtgactaaaagtttttgggcttctcaaaggtattccttagctaggcccttggttttgtagaccggagagcctcagtgtcctctgagacctagtgagggaacttgtatttagttgctcagtggaagagtttggctgtggccatcagaatttaggcacatgcattttgccactcccatctctagagcccctaaagacttgagaatatcggccctggtgtcagggcatggcacagtcctcgcacaacatgtgtttttttctcatgagcagctgatcaactgtgcaaacccaatgcgttgtcttatttggaagaaagaggagagcagtggaccactgacaggggcgtcctctcagacacctgtgcaggtgagcccaggcagatcaggtgagcatcagctctggtcagtaaggggagtgtccagtttggaaactgtcttatcagggcaacctattcatacctttgactgagaagcctgtttggttgagctcccttattaaatgccaccttctttcctttttccctttcctttttaatctctaaaactttgcattcatctcctagaaagatctgtcctactttctcttcatatttaatatttccatgtgtatattttatccatttcctccccactgtacattcttgctaatatttttcctcaacattagtcacaatctttgtagaatccttttttggtaaattacctactatttccttcccatgttcctctgattacataacttctcatctagccacacaccttaaaattttccttaacttttagatgcattccttctcattgcaatttcttcccgtacataggaccagtatttgggaaaaaaagtccacatgtgccttgcctacttttgaggtgaccttgatcccacagtttctttctctgtgtgcttaactttttcttccctaattcatttcagaacctcagtgtcaaccccaagaggcaattcctagccaagatacttttacagagatcctgtccattgatgtgaaaggggtaaggctcaccagggattattcatggttctctatagtaggatgagtctggggttaaccgtaagttagaaaagcagcccaagagccaagagcgattcgaggcaagaagtgtttacccagaaggaagcagtttcttgggagagagtccgtgaatgtcatgaattggtggaaaactaaatgtagatcatgttcgtacaagtaagcattttcacagatatgacacatacaaagtgtttaagacttaatttagccttacacaaattggaaaaattctgcatctaagaagctgcatgaaaataatgaaaagatagctctttgcaacagagtatccaccctattccacttgaaggaactctggatagaaatggtatggactccataaatggtaaaagtatcagatatagaactgtctttttcttacattcatttcacataggggagaatatctgtgaatctaataaggcctttggtcttcacattttccttcatcgacaggagcaacctcagcctggagaaaaactctataaatataatgaacttgagaaaccttttaacagcattgaaccacttttccagtaccagagaattcatgctggagaggcatcctgtgaatgtcaagagattagaaattccttcttccagagtgcccacctaattgtgcccgagaaaatccgtagtggggataaatcctatgcatgtaacaaatgtgaaaaatccttcagatacagctctgaccttatcaggcatgagaagactcatactgcagagaagtgctttgactgtcaagaatgtgggcaagccttcaaatattcctcgaatctccggcgacacatgagaacccataccggagagaagccatttgaatgtagtcagtgtgggaaaaccttcacgaggaactttaacctgattttgcaccagagaaaccacacaggagagaagccctacgagtgtaaagattgtgggaaagccttcaatcagccatcatccctcaggagccacgtgagaactcacactggagagaagccctttgaatgcagccagtgtgggaaagccttcagggaacactcttcactgaagacacatctgcgaacccataccagagagaaaccatatgaatgcaaccagtgtggcaagcccttccggacgagcactcatctgaacgtgcacaagaggatacacacaggggagaaactgtatgagtgcgcgacttgcggtcaggtcttgagtcgtctttcaaccctgaagagtcacatgcgaactcacactggagagaagccctatgtgtgccaggaatgtgggcgagccttcagtgagccctcatccctcaggaaacatgcaaggactcacagtggcaagaagccctatgcatgccaggaatgcgggcgagcctttggtcagtcttcacatcttattgtacatgtgagaacacacagtgccgggagaccctatcaatgtaatcagtgtgagaaagccttcaggcacagctcctcactcactgtacacaaaagaacccatgtgggaagagagaccattaggaatggcagcctgcctttatccatgtctcatccatactgtgggccccttgctaattaacttccattttgtaaaaatataaacacatggggctatgactttccctcgtaatactcctttagctgcatcctgtgtttcaatgtataatattttcattttggtttaattgtaagtattgtcttaacctccattatcgtttattctttgacccatctattatttggaattagatttttcaaaactaatatgtggatatattttcatagaggtataatgacttatagtgaaatgcatacatctgaagtgtacagttggatgagtttgacagatgcatacatgcatgtaaccaccaccccattccagatatagaatgtttctatctctctggaaggttcctgcatgttatatggctatttcttagttgcctttttgttgttggtttctaatttaattacatggtgagaagagtatgtggcctctttgttactgagtcataggtatttgctgagatttgctattaggtctggtgtggcttattcttctagctgccaacccaaattaccccttcctccttagaaaagaacctgggttttctgttcagattggcagtgtgcactattaaaaagcttccatctcccggctgggcacggtggctcatgcctctaatcccagcactttgggaggctgaggctgggggatcacctgaggtcaggagttcgagatcagcctggccaacatggtgaaatcccctctctactaaaaatataaaaattagccaagtttggtggcatgcacctgtaatcccagctacttgggaggctgaggcaggagaattctttgaacccaggaggcagaggttgcagtgagccgagattgcgccactgcactccagcctgggcaacagagtgaaactctgtctcaaaaataataataataaaaaaaagcttccatctcccagcccttcttgcaagcaagggcaggccatttcctccggtcctggctagtatgaatatgagaagtcactggatgtgactctggggaagatattgtgttcagggatggtttcatgtagccacatctctccacttcttgccttttggacaagtagacatgatttctagacctagaggagccctcctgtgaccataagggtaaaagccgcaagctaagaagagggtggccggaagtcataaccatcttgcttctgtaatctaaaaaatatttaggatagatttaatagaattggcatatttatgtgattgcagcagccctggactatttatttctggatgtcccatacatgaaaaatatgcacttcttactggtacagttttcttttgtttgtttttgtttttggtgggaggtttatttcacctgaatataattcctaactgatgcacttagtatatgtcagtttttataaatgcttcatggatggttgaaatcaatgtattgtattctacaaatgtctgctagatcaagcaaatgtgtttaaaaaccatctacacatttataaatgttgatctgtgatctagcatttattgagagaggtatgttaaactctcccaccatgattatgtattgctgaaaaatctttgtcattctgtcagtttttaaatttatgtatatacatacatatatatgttttgaagcaatgaaattaaatatagatactgacattttttacatttccaacaaattgttacttttattcttataaagtgatcatccttttccctattactgaacattcaaccattcattgtaatgatagtaaatacttatttagagtttactattaatagatagtagccactgcctgaagctttgcatcttttaatttagtcctcacactgacactttgaggtatgtactgttatccccaattcccagatgaggaagctgaggcccagcaagttaaggtgggctatcaaagtcatctgggtggcatgtgacaggcctgactctctctacagtggcagacccaggggactagtctccatttttacttgttctttttttttttttttttttttttttggttttaaagttctcttaggtataacttacataaacgttaataaatcttagggtacaccttggtgaattttgtatatgtctatacccaccacggtctccatcaaaatattttatcgtcccagaaatttcccttgggccccacctcatcctcaaaggttatcactattctgatgtctatcaccatagatttgtttttcctgttcatgtaaatggaaccataaacagccctcttgtgtctgttttcttcacttaatatagtgtcattgagatttatctatgttgtattatcagtagtttatgctttttaattgctgtgtaatagtccatagtctgaatataccacaatttaaaaattctattctgtttacaaacatttgagttctgtcctccaggttcatccatgttatcacaaatgacagaatttccttcctcatcaaggctgaatagtattccattgtgtagatataccacattttctttatccattcatccaccgatggacagttaggttgattccatatcttggctattgtgaataatcctgcaggttttattgttatgaataaagctgctgtgaatgttcttgttaagtcatactgtggacataggtattcatttctcttgagtataaatgtaggaatggaattactggattttggaggagacctatctttagctttagtagatcttgccagacagtttttcaatgtggttgaaaccatttacacctcaatttgtacatcaatgaatgaaagtttcattgcttcacatccttggcaacatgtggtactgtcacgcaaattaatttgagctacattagtgggtatgcagcagtttcttaggtttaatttgcatattcttgataagtaatgatgcagtggtagatggttgccacaatgacttcttctatccctctatgtatatgtcttttccatgtgactttgcagctcctcctatcaagaggtggagtttatttctccaaaccttgaagacgagcttggtcatgtgactttctttggccaatggagtgttgacaaacatgacagaagcagaggctggaagaacacacgttgggcttttccttcttagttgtgaccatttgtatgtcatctgtggaaaaatgtctaagtcctttgaccatttttaaattagttttttgttgttgttgagttgtggaagttctttatatattctgaatattaaccccttatcagatatatgatttgcaaatattttctcccattctaggggttacctttttactttattaattgtatcctttgatatgcagaagtctaagattttggtgtagtccaacttatagatattttttgttttctttagatgtcatatccaaaaaatcattgcaaatctaatgtcgtgaggcttaccccctatgttttcttctaagagtcttattgtttcagctcttgcatttaggtctttgatgtattatgagttaatttctgtttgtttgtttgttcgtttttgtgtttttgagacggagtcttgctgtgttgcccaggctggagtgcaatggcgcaatcttggcttaccgcaacctccgcctccccggttcaagtgattctcctgcctcagcctcctgagtagctgggactacaggcgcataccaccatgcctggctaatttttttgtatttttagtagagatggggtttcaccatgttagccaggatggtcttgatctcctgaccttgtgatctgcctgccttagcctcccaaagtgctgggattacaggtgtgagccaccatgcccagccaagttaatttttatatatggagtaagaaaagagtccaacttcattcttttgcatgtgcatatccagttttcccagcaccatttgttgaagactgtcctttccccattgaatggtcttggcacccttgtcaaaattcatttgactataaatgtgaggttttatttctgggctccctcctcgattccattggtctatatgtcttatctttatgccattaccgtattgtgttgattactgtagttttacaataaattttgaaataagtgtggtgtgagacctccaactctgttctttttcaagatggttttgacttcttggtttggtattcttgagatttcatatgagttttaggatggatatttttctgtttctgcaaaaatattaagtcattcagcccgtgaacatagtatgtctatttgtgtctcttttaagttctttcagcaatgctttttagctttcagtgtacaggttcttcatctcattggttaagttaattccaaagtattttattgtttttaatgctgttgtaaatggatttgttttctcaatttcctttttgggttgttcattgttagtgcatagaaatgcaactgtttttttgtgttgatcatcacacttcttttgcaacccatattatgaagtgtcactactctccttggtccaagttaaaatgctttcctggatccaaatggcatttcttttgtggggaattatcaacagtaaagatctaggttgatcaaaactcaagtgtgagaaatgaccaacaggagagggcagagatatccatgggatggagatgaaatagcctttgttattatgggtatattatgggcctcttttctcatccaatccaggatgctgacattcaaggtgacagatcagctgttcatcttgggctgcacctggtgtttgggcattctgcaggtgggcccagttgctatgctcttgcctatctcttcaccatcatcaacaccctgcagggtgtctccatcttttggtgtactgccttttcagtcaacaggtgccactgtctaggtcccactcaagactcttcttgtccttgcctatcttaatgagctgacccagaagatgctttgcctctagcaggtctggggacaaaacaagaaatggttcaaaaagatcagaatgagaagagctaggtctgagaaatacacacactttagaagggctgtgcctgatgccttcaaacctagcacagtaagatcatacattgctcttccccacatagcttctcttactgattcacttggggagcacatggttataacactggcaacctggtccacagtgggtgatgttctaggatggctcacacgaggatgggtcacacttggttgatttattggatgacattttctccattaaaaagtttgtttaagccgggcgcagtggctcacacctgtaatcccagcactttgggaggccgaggcgggtggatcacctgaggtcaggggctcgagaccagcctggccaacatggtgaagctccatctctactaaaaatacaaaaattagttgggtgtggtggcgggagcctgtaatcccagctactctggaggctgaggcaggagaattgcttgaacccaggaggcggaggttgcagtgagccgacatcatgccattgcactccagcctgggcaacaagagtgaaattttgtctcaaaaagaaaaactttgtttaaaaatttggctattcctcattaggtgactgtgctgcttgattcttacacatgtgcattaattctttccgtgaaaatattgagcacctatttggtgctgtatttaatgctatgttcttcataaatgtaggcaaataccaagcacttttagggagagatgtactgtgttagtctgtttttgcattactaaaaaggaatacctgagactgggtaatttataaagaaaagaggtttaacgggctcacggttctgcaggctctacaagcatggcaccagcctctgctcagcttctggcgagggcctcaggaagctcacaatcatggcaaaaagtgaagcaggagcaggaacatcacatgatgagaatgggagcgagcaggcaggggagattgcatgctcttttaaacaaccagatctcgcatgaactactagagtgagaactgacagcaccatggggatgacactaagccattcatgagggatttgcccccatgatccgaatacgtcccaccagtccccatctccaatattggggattacatttcaacaagagatttggaggagacaaacatctaaactatattattctgcccctgccccttaaatctcaataccttctcaaattgcaaaatacaatcatcccttctaaatacctccccaaagtcataagttgttccaccatcaactcaatcaaaagtcccaagtcccaagtcaaaagtctcatctgaagatgaattccttccccgtgagcctgtgaaatcaaagacatgttatttacttccaagagaagatggtggtatgggcactggttaaacattctcatttcaaaagggagacacaggccaaaagaaaaaggcaacagacctcatgcaagttgtaaacccagaagagcagtcattaaatcttaaagctccaaaatctcctttgactccatgtcctgcgtcaagacacactagtgcaagatatgggatctcaaggctttgggcagctccagccctgtggctttgcagggtgcaacccccatggctgctcttatgggttggagttgagtgcctgcaggtttttcaggcagagggcacaagctgccagtgaatctaccattctggggtctggagggaggtggccctccagctccactaggcagtgccctggtagggattcttgtgggggtacgggggaatccaatcctaatagagttcctctgtgggagctatgccccaatgtcagtctccttcctgggcaccgtggcttttccatacatcctttgaaatctaggtggaagccactaagcctccttcatgcttgcaatctgagcatctgcaggcttaatactacctggaaccaccaaagcttacagcttgcaacctgcagagctgcaacccaagctatacctgggcccctttgagccaaggctggagccttgagtggctggaacgtggagaatggtgtccaaaggctgcacagggcagcggggccctggaactggcccgctaaatcattcttttctcctaggcttctgggtttgtgatgggagaggtggcctggaagatccccgaaatgccttcaaagcctttttccttttgtcttggatcttagcacttggctcccttttagtcacgttagtctcttcagcaagtggtggttctgcagccctcttaaattcttcccccgaaaatgctctttccttctttaccgcatggccaggttgagaattttccaagtttttatgctctgcttccctttttaaatataatgttcaactttaattcctttgctcccacatctgactgtaagctgttagaagcagccgtgcctctccttgaacactttgctgcttagaaatttctcccaccagacactctctaagtcattactattaagttcaaacttcccgaaagccttaggacatagacgcaatgctgccaggtcctttgccagggaataacaaggctgacctttgctccagttcccagtaagttcctcatctgagacctcctcagcctgaccttcactgtccatatctctaccagtattttggtcacaaccctttaaccagtctccaagaagttccaaactttctctcatattccttcttccttctgagccctccaaactcttccaacttctgcctgttacacagttctaaagctgctttcacattttcagaaattttctgtattagcctgttcttgcgttgctataaaggaatacctgaggctgggtaatttataaagaaaagaggcttttttttttttttttttttttttgaggtggagtcttgctttgttgcccagacagtgcagtggcgcaatcttggctcactacaagctccgcctcctgggttcacaccattctctcacttcagcctcctgagcagctgggactacaggtgtccgccaccacgcctggctaatttttttgtatttttagtagagacagggtttcaccgtgctagccaggatggtctcgatctcctgaccttgtgatccgcccgccttggcctcccaaaatgctgggattacaggtgtgagccaccaagcccggcccaagaaaagaggtttaattggctcactgttttgcaggctgcacaaacatggtaccaacatctgcttgtcttctggtgagggcctcaggaagcttgtaatcacagcagaaagcaaagcgggagcaggcacatcacatagtgagaccaggagcaagagacagagtagagacgttccatactcttttaaacaacctgatctggtgtgaactaccagagcaagaactgacttacagcaaagggattactaaaccattcatgagcgatttgcccccatgatccaacacctcccaccaggccccacctccagcactggggattacatttcagtgtgagatttggaggggacaaacatccaaactatatcatgtacctattagttaaatataaccaaatatctgaggcagtgatttacaaacttaagagtcccagtatcctaatcatttcctttaatcccatttaatgttaagtctcaccttataccctcttgcccacaatggtggaaaatcaatggcttatgtatacatgcatgcaggtacacctttataaagtaaactgagctatcttaccttggaattcagagtttataaaaatttccagtacttaaaaatatatttggccaggtgcggtggctcacgcctgtaatcccagcactttgggaggctgagacaggtggatcacgaggtcaggagatcgagaccatcctggctaacacggtgaaaccccatctctactgaaaattagccgggtgtggtggtgggcgcctgtagtcccaactactcgggaggctgaggcaggagaatggcgtgagcctgggaagcggagcttgcagtgagccgagattgtgccactgcactccagcctgggcgacagagcgagactccgtctcaaaaaaaaatttttttttcagaatactcaagctgcaaaatttgagctgagacttggtaaaggcatgagataattcttcgaatattttttctatctacaggctgaagacagaaacctcgctgcttagtgtctcttcttatgctagggtgtgatgacagtctgtttctctgaggtctggctgaagttgtgggggtggtcttctcctctcatccctgaggtctcttctgtagcttcatatcagtttttaaatggtcatgttatcttgctaggatatgtagaaactttgtcttatgtttagctttgaagaatttcttgaagcacatcacttataaatgtattcaatagaaagatgagcaggtgaagccactcatctcaaacaacagttactgcatcaaactttctctagacctgggaatgagtgacctatgacgacaatggaaaggatgaagaaaatggcaaaaacttccatgtgaatccctttacaccttaggtcatgttgaatataaaaatgctctagcaataaatgctgggtgctgcaaagtgaaaccagcactgaggcaaaagttctctcagcaaggcagtttacttctgcagaagggtgccacccacgtcaatcaagatccaagagcacagagaacaaaggaggccaggggggttttatatccttaacgcaatccctgcctccatgtccttcccccatgggctggggtcggcacaatgtaagctgacccgattggctacttgcgaatatttctctcaaataaagaagggggaaggggacgtgagttacaatggtgggacgtgcagttttgaagggtatgtgtgtggttttgaggggtggaacgggtgcagaatgcgtgaccgagggaacagatgtgagttattgattagtgccgacgggaaggctgtttatagtaacttggggcagggaggcatagagacaaggaagttaacagactgaacctttgaagagaaaccgagagattcattgcatcctacagtcagggtttctcaactgtgaccttattggccagataattctttgctgtaggaactgccctatgcactgaagactgttgagcagcatccctggactattaactaaatgccagtagcttgggttggggagatgttggtcaaacgatacactttttttttttgttttttgagacagggtctaattgttgttcaggttggagtgcagtggtgtggtcacagctcactgcagcctcaaactactgggctcaagtgatccttcctcctcagcctccagagtagctgggaccacaggcatgcaccaccatgcctggctaatattttttgtagagttagggtttctccattttgcccaggctgggcttgaactcttgggctgaagcgatctgcccaccccagcctcccaaagtgctgggattatggtgtgaaccactgcgcccggtgggatacaaatttcagttagacaggaggaagaagttcaggagatcaattgtagagcatggtgactatagttaataataaattatattcttaaaaaatgctaagagagtggatgtaaattgttctcaccaccaaataataactatatgagacgaggcatacattaatttgctagatctggttattccccaatgtatacatccattaaacatcatgttgctcttgataaatacatccaattttatctgtccaaagaaaaatgccagtgggatccctgctagttgtatactggaaagggcagaaatcctcagttctttgttgtcttgagagaaagattttggctaaaatgactactttagccaaaaagagaatttattgaaggaaaatagagagaagagagttatttttattttttattttttgagatggagtctcgctctgtcacccaggctggagtacaatggcacaatctctgctcactgcaacctctgcctcccaggttcaagtgattcttctgcctcgcagcctcctgagtagctgggattacaggtgcccgtgaccatgcctggttaatttttgtatttttagtagagatggggtttcaccatgttggtcaggctggtcttgaactcctgacctcaggtgatctgcctgcctcagtctcccaaagtgctgggattacaggtgtgaaccaccgtgcccggccactgtcttcattttcagaatgttccacttagttcttcccagccccttctctcttatcccaccatcagtctgtccttccttccttctttccttcctcccttcctctctttctttcacttttttctttttctttctttgcttttcctttctctatctcctttctttttctttgtcttcctctctctttctgtatttcttgcactgtaaatttaagagtttattatttaaaaaaagttaaagctagcaaagcagtttgtaataacccaaactgggaacaacccaaatgtctatcaacagtgatttttttaatttcaacttttatttttagattctgagggtacacgtttaggtttgttacaagagtatattgcatgatgctgaggtttggggtacaaatgaatccagttagtgagcatagtacctgataggtagtttttcaacccttgccctcctccctccctcctccatctagtagtccccattgtctaatgctcccatctttatgttcacgtgtacccaatatttagctctctcttacaggtgagaacatgcggtatttggttttctaagttaattcacttaggatgatggttccagctgcattcatgtggctgcaaaacacaccaccatcagtctttcaaactcccatcccagaatgccctaaatagcagatatttaggacattcataggcagtcccttacatgctgccctggtctcaagcaccgcccctcctgccccctccccccaaggattggcccctttattcattcaatttctcttctctttccctcattcttcctccttataattcccttttcagccacccaactaatttggaagaatttccacatccagtactctcttgcatgttcagatcgctagaatccaacctctggatatcaaaggatcactactggggcttgaagactccaaatctgcagattctgaagcttgcaggtcagtggccttggactttcaaacttccagttccgtgacatccgggctccttaacttccggcttccgggagcttagtcacatacttctggcttccggattgtaggttccccgcaaggagactaaggcctgtgtgggtctttgtttccccagccgtgcaatgactgttagatgcagaaagggggaaaacagccagggaaactgctcacagtggacccccacggtggagagctggagggagagggttcttcaaacgtgtaccctagctcctttgtctgctgtctttggtgggcgtggtcttgtacttaaaatccagctgagaagccaaactctaccttaaagccgtatttcatgtttcaaactggatgatataattctggagaaatgagatgggaaactctgctgcctacttgccccttaactcttgtttatctttgggtttcttactacataccagagcttaatctttattttcttacttaatattcaaacacaacccatgagcaaattaacattatttccatcataaataaagagaatggacttaataaatttaaaaagtgaagatatgggggcaaatggatgctgccatcagctgaccctagagtttcctctgaccttccttccccaacctcgtctgtgtttcacttctgccatgtccttaaaggggctgtgtgtcccccagaccacagagtccattgcactgcacctttccttcctcctcattttccatcttacaaatcatcaatattcctggatgtaggatcatgtctgtcttatatgttttagtttctctcaatttagcattatgccttgcacgagagtataggaatacctcatttcattgcccttcacagatattgcattttttacaaattgaacgtttatggcagccctgtgtcgagcaagtctgtaggtgccattttcccaacagcatgtgctcactttgtgtccctgcttgagcattttttaggaataaactatttttaaattaaagtatgtacattaaaaaaaagacataatgctattgcacacattacagtatagggtaagcatacttttatgcacactgggaaaccaaaaaatgtgtatgacttgctttattgcaatattcacattattgtggtgatctggagtggagcctgcaatatctctgaggtgtgtctgtatgtgctcatcacatatgtgatgaatggatgaataaattagtgtagagtgaagtgcttccatgaacctgaacatcatggtctggaaactatgggcagtgagtcaaatctgacccaccatctgtttctgtacagctaagaatagtttttacatttttcaaatgggtgaaaacaaataaaaagaagaatgatattttgtgtcacatgactgatatatgaagttcaagctcagtgtccataaagttttattaaaacatagccatgatcattcatttatgattgtctatagctgttttcatatcacaatggaagttcaagttcagtgtctgtaaagttttattaaaacatagccatgatcattcatttatgattgtctatagctgttttcataccacagtggtagaattgagttgctgtaaatacctggctcacaaagcctaacatatacactatcaggctctttaagaaaacatttggcgacccctgctctaggtagactctatggggatatgggctctacactcatagggacccacatgttccaagcctccagctgtgtgttctgcttcctcaagcagcagctgactctgatattccccatctcaccttagcagtctatatcaagcaaagggcacgcagaatcccatgcacccatcatgtatgtaataaaaggcagatattatgtggtctcttgaaccagccttaggcatggaggttgaggatcaggagtgacttgagggtactgactggcagagcaggagccccgttattttggacaaacaccgccactttaagtttcagcttcatttttagccttctggatttaaggaaattacttttttaaaaactataagcagccaaaaaaagcagacagtaaaatgcagataaaacagctcgggcacagaggaaggtggaggaaaagtctcttgggtaactgccaaacttcaccctcatacaatgggccccagtaaaacagtgggccttaataagcacattcctttccctccaggtgcactaaaatagggaagctaaaagcagacttggggggtatgcctacagctgcagaaaaatgtataaaagcaaacacaccactctccctcccatataagcacaacaaaaaaaacacagaagcagtccaagcctctaagaaactctcccaccctaaatccttaaacactcttagtctgtagaaaagactctaacctaattcagccagcagcccctctcaggtgtgttttctctaaaataaacctgtcttaaccatcaagccactttttgtgtttctttcctctttctttaattcttacactgacctagtggtggaggcttggcaaggatgcctgttaccaagtgggttacttctgcactatttatagagaaggagaaatggctaaaagtagaggtaccaggttgccaacaatggttacttggggggtagcattcaaagttctccaaagcccctaaatcaatactcattgagcttatacggacaggcacagagcagtgaaaaatgtgagttgcactgggaaatgttcccagctgagttgacaaagcaatgctctgtaatgttttggttcttataaaaaggtgcccagaggatggagatggtaggtagtgtagggcagtgcaagaagctccagctctgggaccagttggatggggtttgaatcctaaccctggctcctgttagtgggatggcctcaggcaagtcacttaacattcaggatctcaatttctcttttgtaaaacaaatagaggctaggtgcagtggctcaagcctgtaatccccgcacttagggaggctgaggcctgcggattgcctgagctcaggagattaagacctgagcctgggcagcatagtgagacccacgtctctacaaaaaatacaaaaattagcccggtgtggtggtacacacctgtagtttcaaatacctggagggggactgaggcaggaggattgcttaggccttgggaggtcgaggctgcagtgagcagtgtttgtgccattgtactccagcatgggtgacaaagcaagaccctgcctcaaaaaaaattagaatctaccaggttgagttgcttttggaacttaatattatcatctatgtgagatttcatatatttttgtatttttactagagacaagatttcaccatgttgaccaggctggtcttgaactcctgaccttaggtgatctgaccacctcagcctcccaaagtgctgggattataggcgtgagccactgtgcctggccaggagcagaggtttaataggcaaaagaaagagaaaggagaacagctctttctcttgcatgggagaggggcgtctgaatgggaaatctgaccctcgtcatagtgtaccagattttatagacaggcttgagaaggcggtgtctgatttacctagggcctacccctatgtgagctggccaccccaccctaatcttattatgcaaatgagctttggctgacactatgttgcctgctttttactgtacacatggctggcaaagagaagggaacttggagccgccattttggacatgcctagtctaggtagctttttcctattggcacagctgccggcattcacccgtggaagcttccagcttgcttgtctatgtctgcagctcgattttacaggctgttctttgttagaaaagaaaatgattttgggggctgcttttcattaaatggaaaaccttactgaggacttcctacccttgctatttgcctaaatgatttctccttaactcctatatcatcaccatgcttggctaatttttaattttttttttgggtagagatggttctcactctgttgcccacactggtctcaaactcctgggcttgagccatcctcctgcctcaccctcccaaagtgctaggattacagggcatgaactgtgccatacccatcttcgaggttttatggtcatgtagaatttctgttcaaggaaagcagataacagacagggttaagggcatttgcttggaatatttaggagttttgcaggtcattcctttgaaatggaatttgttgcacatccccgatctgagattagaaacttttctgcatgttggtgtgaagacgaaagaagacagtgtttataaaatagtttatacttcaattgcctagcagtagaaacctgatttctaggaatttcggcttctgagtcaactctagctgcaagagccacttcattttcccctaaaagctccatgaaggcaggagccgtgtctctcttgatctatgtgtgagtaatcaatatttttcacatgactaaataatcaaacccgtagaactagagaacaacaaaaacaaaaacaaaaaattaagaaatccagatcgtggtgtgaacattctagtcctttcagatgttgtcggtatgaaagtcctcttaggctcgttttcctgcttcattttaagatttggaggagtctttgtaggaaggagaggctgtgaaagaggtcttaacgttctatagcttcataaatattgtgcttcagagtgaccaagatatgggccacagctggccgtccatatgctgagagtttgatgagcacattgcagggcatggaagatttccggtttctgcaggaattgaatgcctagcacgccttccataacatccttcatattgctgacatggtgaatttcttgaaacacacagaacaaagtcttttctttcccctctagatggctcaaagattgttcagattttccacgggcaaagagggaagatcttattcagaagatttttctagttaacctgaaatatatatatatgtatgtattttgttgttgagacagagtttcactcttgttgcctgggctggagtgcaatggcgcagcctcgactcactgtaacccccgcctcccaggttcaagcaattctcctgtctcagcctccagagtagccaggattagaggcatgtgccaccacacccggctaattttgtatttttagtagagacagggtttcaccacgtaggccaggctggccttgaactcctgacctcaggtgatctgcctgcctcagcctcccaaagtgctgggattacaggtgtgagccactgagctggcctgaaatatatatatatttctaaatatatttagaaacatagatatatttagaagtatatagatatttagaaatatatagatatttagaaatacatagatatttctaaatatatatatttagaaatatatagatatttagaaatatatagatatttagaaatatatagatatttagaaatatagatatttagaaatatatagatatttagaaatatagatatttagaagtatagatatttagaaatatatagatatttagaaatatatagatatttaatatctatatatttagaaatatatagatatttaatatctatatatttagaaatatatatatttaatatctatatatttagaaatatatatatatttagaaatatatatgactatagaaagaaaacctataatttccattttgaaaaagaaataagaaattagttaaataagtagattatagctgcttgtgccacaaaaataagtaactatgtgagatgatagatatattaatttgcttcacatatagataaccattttattatctatatgtatcccataacttcatgggttaaacctcaattgtgtgtatacacaataaaatttattaaaaaaaagaaatttaagaagtcttttttttttttttctttttagagacagggccttgctctgtcacccagtctggagtgcagtggcaccatctctgctcactgcaacctccaactcccaggttcaagtgatcctcctgcctcagcctcccgagtagctgcaactacaggcatgtgccaccactcctgtctcattttttaattttaattttttgtagagatggggtctcactgtatagcccaagctgctgttgaacttctgggctcaagtgatcctcccatctcaacctcccaaaaatgctggaattctaggtgtgagccaccatgcctggccaagaagtctttaatcataaggttttcttaccatatgtatttgtcagggcaacatcaaaaggccatatcagctttcattttgctccatcctgttctttctcagaagccccatctttgtatgcctcctaaaccccaagttaccaaagttaagaggaagtaaatgtgttgcagtaaagtatctatctgggccaggtgtggtgactcacacctgtaatcccagcactttgggaggccgaggcgggcagatcacttgaggtcaggagtttgagaccagcctggccaacatggtgaaaccctgtctctactagaatacagtagtaataataataatcaattagctgggcttggtggcaggcgcctgtagtcccagctactcgggaggctgaggcaggagaatcgcttgaatctgggaggtgggggtcacagtgagccaagatggtgccactgtactccagtctgggcgacagagtaaaactccctctcaaaaaaaaaaaaaaaagttgtatctgaagtagggtgattatagttaacattaatctaccatacatttcaaactagctagaagagaataatttgaatgttattagtacaaagaaaagataagtatttaaggtgatagatatcttagttaccctgatttgcttatatgagtgtagcaaatgatcacatgtacctagaaactatgtacgtctattatggatcaattaaaaaacatttaaaaagatctatctgtttccaaatgtatgtcttgacctcggagctccagggtttgtgtaatgttgctttaaatgtggagtcataaaagaagccaggtgggaaattaatgaaatgttagaagtgttatctattgttaaccacataagatttaaaggaaaaagcactgaattccttttttttcccctgagacaggggtcttgctttgttgcccaggctggagtgcagtgatgggatcatagctcactggatacttgacctcctgggctcaagcaatactccaatcttagcctcccggtagctgggactacaggcatgcaccaccatgcctggctaatttttatactttttgtagaaacggaattttgccatgttacccaggctggtcttgaagtcctgagctaaagtgatctgcctgcctcggcctcccaaagtgctgggattacaagcgtgagccactgcgcccagcctgaattccttttttccatatcttttccatctccaatatgagttatttattcctaggttcataggaaactcagtgtaatttctatggttcgagatggtcagcttcacttgcttatatagttagtatttaatgcataattaatatgtgctcaagagattaataaatattgtgcttcaggagattattcagtagtgatcacaagacattttgtttttatgaaacaagactgcagaaagccatggcagagactgcagaataagagcaagacacacattttcttttcttttcttttctttttttttttttttttgagacatagtctcactctgtcacccaggctggagtgcagtggctcgatcttggctttactgcaacctctgcctcctgggttcgagtgattcttgtgcctcagcctcccaagtagctggaattacaagcatccaccaccatgcctggctagtttttgtgtttttagtagaggtggggtcttgccatgttggccaggctggtctcgaactcctgacctcaagtgctctgcccgccttggcctcccaaagtgttgggattacaggtgtgagccagcgtgtccggccaaggcacatacattttcaaacaccagagataacaagttttaggaaacagtagaagataaaatgacattaagtaatgcaatggattttcttggtcctttgtcagtagctggtagaaatatctgatcacacaccttaaatttcagaagcctttgttggctatctgatgacctaactctaattccctacacaaaagtacatgtttcctttcttcaatgtgtatatatcatttctagtggctgtgtggggtgaaagggtgataaatatttatgcaaatatctacaatatgaggcaggttttgatgattctacaataggtaaacccaaactatatgggtatgagagacagaataatgaccccccaaagaggttcacatccctaatccccagaacctgtaaatgctacctgacatggagaaagagactttgtagatacggttatgaaaaggatcttgagatgggaaaattgccctggattgtcttggtgaacccaatgtaatcatcaaggtctttataaagtatgaaggctgtaggagagtcaaagacagggatggactgggcgcagtggctcacgtctgtaatcccagcactttgggaggccaaggcgggcagatggcttgaggccaggagttcaagactagcctggccaacatggtgaaaccctgtctctactaaaaatacaaaaattagccaggcgtggtggcgggtgcctgtaatcctagctactcgggaggctgaggcacgagaatcacttgaaccctggaggcagagtttgcagtgagcccagatggtgtcactgcactccagcctgggtgacagagcgagtgagactctgtctaaaaaaaaaaaaagaggatggacagtcaataatatgggaatgtggaaggtggatggtcatgtttggttgtatgattgagagcatggagtttacaatgtgtcatcatgatgacttggatttgtgtgtgtgtgtgtgtgtgacataggtggtgagggcatttagtgagaacagaaaaggaaatagaagatcctgtgttggaaacagggattgtgcaggttggatgaaaaaggtaatgaggccaggtgtggtggctcacgcttgtaatcctagtactttgggaggctgaggcgggcagatcacctgaggtcgggaatttgagaccaacctgaccaacatggagaaatcccgtctctagtaaaaatacaaaattagccaggcttggtggcacatgcctgtaatcccagctacttgggaggtggaggcaggagaatcgctttaacccaggaggcggaggttgcggtgagctgagatagcaccattgtactccagcctgggtaataagagcgaaactccgtctcaaaaaaaaaaaaaaaagaaaaataaaaaaggaaaaaggtaatgagagaaatgcaaatgtggaaaaagtgcctggcagcatggtgggcttcttttcaagactttaaaaaatttattatttatgtatttactttacacaaggggtcttgctctgtcacccaggctgtagtgcagtggcataatcgtagctcaccgtggccttgaactcctgggctcaagtgatcctcctgcctcagcctcccaagcagctgggattataggcatgcaccaccatgcccagctagtttttatattttgtgtagagatgggattttgccatgttgcacaggttggtctccaactcctgggctcaagcgatcctctcgcctcccaagtagctgggactacaggcatgtgccaccacgcccagcgaatttttaaaacttttttatagagatggggtctcgttacattgcccaggctgaataggctgttttttttttttttttttttggcagagtattgctgtgttgcccagggtggagtacagtggcatggggcaatcttggctcaccacaacttttacctccccggctcaagcaattcttgtgcctcagcctcctgagtagctgggattataggtgtgcaccaccatgcctggctaatttatgtatttttagtaaagatggagttttgccatgttggccaggctggtctcgaactcctggcctcaggtgatttgcttgccttggcctcctgaagtgctaagattataggtatgagccacggtgcctggccctgaatgggctctttaaatgtgaagcaagactcaagaggcctaaatctcactggctgaagagactctgtacatttcttttttttttttttttttttttgagacagagtctcgttctgttgcccaggctggagtgcattggcgcgatctcggctcactgccagctctgcctcctgggttcacaccattctcctgccacagcctcccgagtagctgggactacagtcgcccaccaccacgcctggctattttttttttttttttgtatttttagtagagatggggtttcaccgtgttagccaggatggtctcgatctcctgactttgtgatccacctgcctcggcctcccaaagtgctgggattacaggcatgagtcactgtgcctggccgagactctgtacatttgacacaaatccaagtagtcttactttgctcatcagtgaaatggggttagaattacacatataatctggagaagatggaagaagaggtgagaaaaatacaacagaactttgtatgtctacattaataaatgttggttattagtcatcaatgtcatgaattatcccatgccattgaggcataggataatatggcttcaagtgatccccaagttgtcccgggctcaagtgatcttcctgctttggcctcccagagtgctggcattacaagcttgaaccactgttcctggctgatttataaaaaagcatttaaactgagatcattgctaatggttaatgagtcaaggagtcgctcaaatgtgaaccctcttagggcatcacccgctgattcccaggttgcccagtgtgtttttaaaactttatttatttaattttgttatttgtattattttctagagaagaggtcttgctgtcatccaggctgaaatgcagtggcacaatcatagctcactgcagcctcaaactcctgggctcaagtgatcctctcacctcagcttcctgagttgctgggactacagatgcacacaaccaccctcagctaatttttaaatgctttatagggacgaggtgtcactgggttgctcaggctagtcttgaactcttggcctcaagcagttgtcctgcctcagcctcctaaagtgctgggattacaggcatgagccaccatcgctggccccattactgcttttctttctgagttttgcagtgggtagagggtgctgagtagaggcactgcccactacccactactaagtggtagttggtagaggcagacttgttaagaaagcctaaatcccagttaacacttatttctgtttaattcataaatatgtacagcatttcctcccatgcttgccttattgggtggtggtgccaagtgactgtgagatagacttgtatgtagaggaaagggatagggtaaatgcttctaggtagaatgtgcatcactgcttcagatcaattcctgctcatttagttaaccatgcatggcacatagtaggtgtccaataggagtgtttgtgtgtgagagtcaaactaagcacagttccctaaggagtaagagccaaggattttttttttttttttaatttttgggatagggtctcactctgttgcctgggctggagtgcagtggcatgatcatggctcactacagcctcaacctactgggctcaagtgattgtcccacctcagcctcccgaggagtagctgggactacaggtgtatgccaccatgtctggctaatttttatttttattttttgtagagatgggatcttgctatgttgcccagggtcatcttgcactcctggcctcaggtgatcctcttgcctaggcctcccaaatgctgggatgacagtgatgctgggatgacaggctatgactgattaaaaaaaaacatttaaactgagatcattgctaatggttaatgagtcaaggcgtactcagatgcgagcctttctagggcattgcctgctgtattcccaggtttccttgtgtgataggcacatgctcctcaggtgggtcggttagtgaagtgctctggagcaatgcgtgatcttaccgtgctgggtttggaggtgtcagccttagcactgctggagagtgtgtgcatctcagactcagttttcaatttcctgatccctttggaccatttcccatattgctcccggacctgcagaggcaaagtgtgtactgggtcagctcacagagagcagtgaggacaggaagagtcctgggtgggagctgggcagtggtacctgctggctgaggaggcagtacaccaggaagatgaagacaccctgcaggctgttgatgatggtgaagaggtaggccatgacccgggcagccggacccacctgcaagatgcccagacaccacgtgcagcccaggatgaacagctgagctgtcgctttaaatgccagcatcctggattgagtaagaaaggaggctggtgatgcacccagagaaagagaatcaaggctatttcatctgtgcccatggagtcccctgccctcccctgtagatgatttctcagactgggctgtggtcagcttagatatttactgtcaactatagcccacagtagaaatgccacctggggttggccacggtggctcatgcctgtaatcccagcactttggggggccaaggcaggcagatcacctgaggtcaggagttcgagaccagcccgaccaacatggtgaaacctggtctctactaaaaaaatacaaaaattagccaggtgtggtcgggggggcgcctgtaatcccagctactcaggaggctggggcagtagaattgcttgaactcaggaggcggaggttgcagtgagtcgagatagagccactgcactccagcctgggagtgacagagcgagactctgtctcaaaaaaaaaaaaaggattatttttgaatatgcaaagagatttctgtgttcatgaactacacagtctcttcaaatcaccaatacaaccaggcatgacacacaaaatttggaaaggataatgataggaatctagaagaaagttcattaattttgcacaagggtgcctggaacaacaaactgctcaaaccctgtagaggaattatttttatttttatttatttatttttttgagatggaatctccctctgtcacccaggctggagtgcagtggcgtgatcttggctcactgcaacctctgcctcccaggtgaagtgactctcccacctcagcctcctgagtagctgggattatagacgcccaccaccatgcctggctaatttttgtatttttagtagagatggggtttcaccatgttggccaggctggtcttgaactcatgacctcaagtgatccgcctacctcggcctcccaaagtgttaggattacaggcgtgagccaccatgcctggcccccgtaaaggatttaatgttgattaggattttcccagagggaggattgcatgagaagtgatgaggagcctgaactgagggtacggtatgaaggtgcagactgggctgtgggaacaggcaagaaaatgtacgtgttctttgcacttttttttttgagttggagtcttgctctgtcacctaggctggagtgcagtggcgcaatctcggctcactgcaacctctgcctctcaggttcaaacaattctcctgcctcagcctctggagtagctgggattacaggcacccgccaccacgcccagctaatttttgtatttttagtagagacggggtttcaccacgttggtcaggctggtctctttggccaggctggtctcgaactcctgaccttgtgatctgcccccgcccctcagcttcccaaagtgctgggattacaggcatgagccaccatgcccggccttctttgtgcttttgttataggactgctgacaaaagtccaaagaagtttttaaccttttagtttattgattcgtaatgtttgtacatctttgtggggacatatgtgatattttgttaacatgcatagagtgtgtcatgattaagtcagagtatttggggtatccgtcacttcgcgtgtctaccatttgtatgtgttgggaacacttcaaattctcccctctagctattttgaaatatacaacatattgtgaactagagtcaccctactctgccatccaatattataacttattccttctatctgactgtatgttgtacccattaaccaacctctcttcatcgccttgcccactcacataccctttccagactctggaatctatcattctactttatttttatttttagtttttgaggcagagtctcactctattgcccaggctggagtgcagtggtgtgatctcggctcaccgcaacctccgcctcctgggttcaagcggttctcctgcctcagcctcccgagtagctgggactacaggtgcctgccaccatgcccggctaacttttatcattctactttctgcctccacaagatcagcttcttcggctcctctctatgtaagtgacaacctgtggtatttgtctttttgtgcctggcttatttcacttaagagagtgacctccagtttcatccatgttgctgcaaatgacatggtttcattctgttttgtgatcgaatcgtatcctattttgtatatataccatttaccagtcaatgaagattcttcctgttgctctgggattcacaaactgagattagacatggacaaaacatgttgcatggggtctcaacaggataccactgaatctgtgatggctgccatagaaggatggctgcgtctgttttttctgggtcccttcaaaagaccctgagaagggacctcagtggctgctgaggcacatggcttggctcttgggaaccatacatgtctgtgtggttatcacccccttctccatcttaccttgtgttccggagggtggacacttcactattgagggaggagagtctgtttttcaaaatccagagagtcaccagaaagagaactaaattcaccttcagaaaaccacagaagatttgttgaatagattttgaaacctgttatctctttttttttttttttcagacagggtcttgctctgttgcccaggctggagtgtggcggtgcaatctcagctcactgccacctctgcctcccgggttcgagcgattctcctgtctcagcctcccgagtacaggcacccaccaccacgcctggctaatttttgtatttttagtagagacagggtttcaccatgttggccaggctggtcttgaactcctgacctcaagtgatctgcctgcctcggcctcccaaagtgctgggattacaggcgtgagccaccacaccgggcctgaagcccattatctcttcatcctagcctgtctaatatgaattatacacgtaagtctttttcttaaatattgagtaacagtgttgagtttgaagattcaagagtggtcttaggaaacctaacccaacccatgacaacccaggggacattcctgctcttgtcaccatctttattatcttgtttttctaatgaccctcagcggggcagcgaggatgctcagatgatgtcactcacagagaagatggcgcagacaggtccaaggaagccccatataaatcccttttctggttggagccagcagctgaaaaaagagagattaaaaaaaatgcatcagtttttggagatatggaacagttatgtaaatctattccatccctcctcaccacttcctcacttccttcctacgtcaacaatattaagtgtttctttagtgatagggtctgtggttggctctgaagatacagtggtggagaaaatgaacacggtcttagatccccaaaatttcaactcaaggaagatacacacaatcagacacattcaaacaatgaaacaaaaatggaaggttgtgccaggcacagtggctcacaccaggactttgggaggccgaggtgggaggattgcttgagaccaagagcttgagaccagcctgagcaacatagcaagaccccatttctacaaaaaataaaaaaatagccgggtgtggtggctcacacctgtattcccagttacttgggagactgaggtgggaggatcgcttgagtccaggaggtcgagactgcagtgagctgtgattgcactactgcactccagcctgggcaacagagcaagacctatattgcagcattttaaaatggctgaatgaggccaggtgcagtggttcacacctgtaatcccagcactttgggagccgaggcgggtggatcatttgatatcaggagtttgagaccagcttgcccagtgtggtgaaatcctttctctactaaaaacacacaaaaaatgagctgcgtgtggtggcgcatgcctgtaatctcagctactcgggaggctgaggcatgagaattgcttgaacccaggaagcagagagcagaggttgcagtgagccaagatggcaccactgcactccagcctgggtgacagagtgtttctaaataaataaataatgactgaatggtctcttaacgttcctttttatggctgaataacatttcattgtggatatattacgttttgtttattcattcatcagtgataggcattgtttccaatttttgactattctaaatactgcttctatgagcattcatgtacaacatttttctaaacgtttattttaggttcagaggtacattttgtaggtttgttatgtaggtaaaatgcatgttgcggcggtttggtgtacagattatttcgtcaccctggtcatcagcacagtactctataggtcgtttatttatcctcgccctcctcccactctccaccctcaagcaggcttcggtgtctgaagtttccttgtttgtgtccatgggtacccaatgtttagctcctacttataagtgagaacatgcggtatttgattttctgttcctgcattaattcacttagaataatggcctccagctccatccatattgctgcaaaggacatgatcttgttattttatttttttgagatggagtctcgctctgtggccaggctgaagtgcaatggagccatcttggctcactgcaaactccacctcccaggttcaagcgattcttgtgcctcagcctcccaagtagctgggattacaggcacccacgaccacgcccagctaacttttgtatttttagtagagacggggtttcaccatgttggccaggatggtctcaatctcttgaccttgtgatctgctcgcctcggcctcccaaagtgctgggattccaggtgtgagccaccgcacccggccgatctccttattctttatggctgcatcatgtacaagtttttttgtggacatcgttttcatttgttttgggtatatacctgggtcatatggtagctctatggttaacttttggaggattagtgttaatagttcacaaaaccaaaaacggaaaaagaggaagcactttccaaatcttctacgaggccagtgttactctgacaccaaacccagaaatagacatcacaagaaaagaaaactgcagaccaaaatcccttatgaaaatgaatgcaaaaatcctcaaaaaaatactagccgaccaagtcctgcaacatattaaaaggattatataccctgaccaggtggtaattatcccaggaatgtaaggctagtttaacatctaatcatccatcaatgtaatacacatattaatagaataaaggattaaagttatatgatcacattatagttatataattatgtaatcatataattataagatcacattataattatataaccatataattagccatatataaccatataatattccccaggactcaaaggtaaataattaatcatatataaccatataattatataaccatataattataatgtgatcatataattttaatcctttattctattaatatgtgtattaataaaataaagaattaaggaagcatataattatgcttatataattatatgtaattatatatgatatatacatatataatataattataatgatatgataatatatgattatacaatttaatgtgatcatattatttatagttatataatataattatttatagttatataattatttatagttatgtaatataattatttatagttatgtaatataattagttatgtaatataattatttagttatgtaatataattatttatagttatgtaatataattatttatggttatataattatttatagttatgttatgtaattatttatagttatataattatttatagctatgttatataattatttatagttacataattatttatagctatgttatgtaattatttatagttatataattatttatagctatgttatgtaattatttatagttacataattatttatagctatgttatgtaattattcatagttacataattatttatagctatgttatgtaattattcatagttacataattatttatagctgtgttatgtaattattcatagttacataattatttatagctatgttatgtattcatagttacataattatttatagctatgttatgtaattattcatagttacataattatttatagctatgttatgtaattattcatagttacataattatttatagctatgttatgtaattattcatagttacataattatttatagctatgttatgtaattattcatagttacataattatttatagctatgttatgtaattattcatagttacataattatttatagctatgttatgtaattattcatagttacataattatttatagctatgttatgtaattattcatagttacataattatttatagctatgttatataattatttatagttatataatattaatatataaattacatagatatatatttatataaaaattacatataaaataatctaatataattatataattatatgattatctaattatgtgatcatataatttttaccccatataattaaaaattatatgcttcggaaaagcatttgacaaaatcaaacactctttcttcatcaaaataccgaacacatgaggaatagaaaagaatttctttaacctgaaaaagggtatctatgaaaaatcctcagctaacatcatacattaatgaggacagagtcaatgctttctccctaagtacaggagcaagacaaaattgtctgctgttctagtcaacagtgtcctggaggtttcaaccagtgcaattggcaaacaaacaaacaaacaaactagctagaaaagtacctggcacaaagtaagcatctcataaatcttaactatgacaatatcaattattttagttattcaaatcaggtctactttttcaaatgaaaaattggagtatcctaaaagatttagataaagtaggttagatttttaaaaaatgctgtcttgagcactttgatttcattcttactatttcagtgagacagatttaaatgcattatccctaactattattattattttttagagacaaggtctttctctcttgctcaggctggagtgcagtggtgcaatcatagctcactgcaacttcgaactcctgggctcaagcgatcctcccacctcagcctcctgagtagctaggactacaggtgtgtgccagtaggccctgctaattttttaaattttgtaaagaaggggtcttgctgtgttgcccaggctggtctcaagatcctgggctcaagtgatcctcctgtgtcagcctcccaaagcacagggattccaggtgcgagccactgagcctgaccctccttaattattataatcttctagcagaaagatgccctagggattatgacatagtgtctttgtcctattcgtgctttccaaaggcttgccctttatttcattcagaaaatttccgaaaaccctcttctacaatgcctagcttgaaatgtaattgaaataaactcaatagctaagaataaggagctgcagtgtaatccaaccaatagagcctaaaatccctactgatctaattaaaagcaggtgtcataaaaatgctatctaggttctagcaatggccatggttatgccggagaagataaggattgtgagaatttgcactaaccgggaaggtgttccataaaggtgaggcctggaggctgcagaaatggccactgtcacagctgggactccgtagcccacagggaacatgagcttcttcatgaatctgttgatgcttgagtagttgaccaccgtcaggttccgtgcagtgaggaagaggtacagggcctccagcagcatccaggtcaaggtggccaggtagagatagtgcaaggtaccggcgatgatggagcacagcacctggcggagaagtaaaagacgcccagagcggcgatcagatttgagtgtggcccatggcttctcctgtaccatgttgttggggagaattctgagatatttgatggcattatagagaatatttgctgtgtagttgagtcaggcaatgggaaattggtggtgttctcttctaatattccccaggactcaagggcctatatatatatacgtgtatatatacgtatacacacacacacacacacacatatatatatatatatatatttttttttttttttttttgagacggaatttcactcttgttgcccaggctggcatgcaatggtgcgatctcggcttaccacaacctccacctcctgggttcaagagattctcttgcctcagcctcctgagtaactgggattacaggtatgcgccaccatgcctggctaattttgtatttttagtagagacggggtttctccatgttggtcaggctggtctcaaactcccgacctgaggtgatccgcccacctcagtctcccaaagtgctgggattacaggcatgagccaccacgcccagccgggctattatattaaggaatcaaatgccgcatcattccatgagccagcgtgtcctgcgtcaaggaagggagccctctggaacaccgctgtcaataccttgtgtccggtttgatcaattgccacgaggaagaggaggtgggccaggaagaggcagagcgagagctgcagatgcagtgaggtgctggtgttctggatggctttacacaggagaaaagtgagggccgccaggaggaggcacagcagagagacgctcagccccatgtaggtgatgacagtcagcacgggatcctcctcctgggacccggaaaagaagagttcacagtgatgctttcctgctctggggtaatgaccccaccaccatttaaaatttttactttggcatagcacattcaagaatgagggagccaggtaaatttgtgaagatgtcaccaatttaatttaatttgcgaaggtgtcacccgagcctcatgggtggctaggaatacaggcgtagtcatgtaggtgacaacgggtgtgcattatagtcatgtatggcaccatgccctgctaatttttttttttgacagtcttgctctgtcgcccaggctggagtgcagtggtgcgatctctgctcactgcagcctctgtctcctcggttcaagcgattctcgtgtctcagcctcccaagtagttgggattacaggcacgtgcctccatgccaggctaatttttatacttttagtagagacagggtcacaccatgttggccaggctggtcttgaactcctgacctcatgatccacccgcctcggcctcccaaagtgctgggattacagtcgtgagccaccacacccgtcctaattttttttttatttttgtagagacagggtctttctgtgttgcacaggctggtctcgaattcctgggctcaagtgatcctcccgtttcagcctcccaaagcacagagattccaggtgtgggcccgttaggttttgaagggaaagtgagagttaaagaaagacagagagttggcagctctacagcaatgcaggtttatgtccagcaggagacttgtggaggggggagctagcttcgtgccagaacccactgccgcttacaggctggggtaattacaggtctgggcgggaggggctgggcggtatggcttgctgcctgggaggatattgataagatgttcctgtcatggaaaacaaaagggtggtttggccctttctcccgcaggatatgatgatgatgtcccttggatctactctaagtgatgagataagaaagtcaggtgggcgaggtgtggtggttcctgcctgtaataccagcactttgggaggccgaggcgggtggattacttgaggtaaggagttcgagaccagcctggccaacttggtgaaaccccatctctagtaaaaatacaaaaattagccgggcatggtggtgcatgcctgtagtcccagctactcaggaggctgaggcaggaggatcccttgaacccagaaggtcaaggctgcagtgagctatgactgtgccactgcactccagcctgggtgacagagaccctgtctaaaaaaaaaaaaaaggcagagtttaccctgggtgggccagacctaatcagatgagtctttataagctctgggctcttcctggagaatcagattcaaaacttgtgacggttaatactgggtgtcaacttgattggattgaaggatacaaagtattgatcctgggtgtgtctatcagggtgttgccaaaggaaattaacatttgagtcagtggactgggaaaggcagatccactcttaatctgggtgggcactgtctaatcagctgccagcgtggctagaatataagcaggcagaaaaatgtgaaaagagagactggcctagcctcccagcctacatctttctcctgtgctggatgcttcctgcccttgaacatcagactccaagttcttcagttctgggactcggactggctctccttgctcctcagcctgcagacggcctatcgtgggaccttgtgatcatgtgagttaatacctaataaactcccctttatatatatctatatctatctatatatatagatctctctctatatatctctatatatgtatatatttgagtcagtgggttgggaaaggcagatccactcttaatctgggtgggcaccatctaatcagctgccagcgtggctagaatataagcaggcagaaattatctatctatctatctatctatctatctatctatctatctatctatctattccattagttctgtccctctagagaacctcgactaatacaaagcttaagagggattctgcgtgaggaaatttttttccttgtcctccagataggaatgctagaagtttgccagagggtcatgtgagaagggatatgagtggcctctaggaactgaatgtgatgccttcctgacagctaagaaagtgagacttcagtcctacaatcacaagaaactgaattctgccagcaaccagggagcttggagaaggacctcaagtctcagatgaaatggcagccctgggggtggggtgacatgatgatttcagtcttgtaagaccctgagcagaaaagccatcttgctatgccagcttgctgacccagagctgtgagataatgcatatatttttttaaaaggctgctacgtctctggggatttgttacacggcaataaatgcagagtgcatcccctcctaagggtctcacctgcacatcgtagtgggccatgaggacggcaaagctgctcaggtgggtgcaacggcagatggtgctggtgtctctggtgcctattgtgctgcagcctgtggtggcccagtgaccacatccattctggccatgctcccagaagacacagagcaccttctgtctcgggatcactgactgcaggaacagaacacaggtgtgggctgggcatggtggctcacgcctgtaatcccagcactttgggaggctgaagcaggtggatcacttgaggtcaggagtttgagaccagcctggccaacatggtgaaaccccatctctactaaaaaaaaaaaaaaaaaaaaaaaatacaaaaattagctgggcgtggtagcacacacctgtagtcccagctattagggaggctgaggcaggagaatcgctcgaacctgggaggcggagactgcagtgagctgagatcgtgccactgcactccagcctggctgacacagcgagactctgtctcaataaaaaaaagaacacaggtgtgagctggtgggtcggatgctcagaaatgcttacccaaagccggcttgggaaggactgactttcctggggagataatgtacccataacagagacccctgagccccagggctgagctgagcagcaaggctatgcccggactcagactattcacccaccaaccaactccaccagcactcacacggtgggagaaggtgaaggtaactggggagctgaggttttgggtgtcgttgttgctcagaaaggcagagatcacatctgagagcaggatgggggagccgtcctgcagcaagccctggtgtgtctcatgcagaagcatctgcttctcaggttccaggaccagaggggcctcagccagcaacttgcccatccctggaatggagacaaggcccaccacagaagggcctgcagggcgaggccaaggttgaatcttggagtaggttgaatctctgggtccacaccagagttcctctgccctgcacagaactttctactcagatgggctaccttcctttggcttcacccctcccacactttccttcaatctttagttctatgtgtatcacatcctgcaggacaaggccacggttaatatctcagggtccccaacaaggtccgttcctcctcagctggactctcctcttacagccccactccaaacatcccacacttccctttaatctttaaatttcttatttttcacattcttgggcatcttttcccaccatgaagcttcactgaccacctccccatctcagccattacctgggtcaccagatttctgtgcctgattccagtcgagctgcatcactgcctgattctgtctcaaggtgacactcctgtctacttgcttctgcacctccagggacaattctatgagttgtgggaattacataaggggggttaggttaggaatcgtgcctgcagtggttgatatactatgacttaatatatatactatatacatatatagtctgaagttacaaaatatcggaagagaatagtgtgagcaactgtatatctacaaagtaggtaacctagatgaaatggacacattcctagtgacacacaaaccactgaaatcaactcaagaagaaatagaagatctgaacagacctataacagattaaatcagtaatcaaaacctctcaaaactaacagcccagaccagatgacttcactggtgagttctaccaatagcttaagaaagaatgaacatgaatcttttacctttttaaaaatatggaagaggaggaaacactatttaagtaattttatgagtctaatattgctctgataacaaaaccagatgaagacatcacaagaaaataaaattatagaccaatatttcttatggacatagatgcaaaaattttcagcaaaaatgttaggaatacattttacgaaggagactcaagacttataggaaagttttttgagtatttttttttttttgagacaaattctcacctgttggtcaggctagagtgcagtggcatgatcatagctcactgcagtctcctgggctcaaccaatccttccacctcagcctcccaagtagctggcactacaggtgctcactaccacagccagctaatttttaaattttttgtggagatcatgtttcagtatatttccaaggctgggcttgaactcctgggctcaagcaattctcccaccttggtggcctctgacaatattgggcgtgagccactgcttctggcctacaaaagtgtttgaaagaaataaaaggccctctctaaatggaaagacagcctatgttcatggattggaagactttctattgttaagataacaatactcccccaaagtggtctagagactcaatgcaatccctatcaatattttagcctattattactttgcagaataagaaaagttcatcttaaaattcatatggtgttgtaaggaatccaaatacccaaaaacaatcttgaagaagaacaagaaggttggagaattcacactacctgattccaaaacttactacaaactgacagtaatactggcataaggacacaacagaatagaattgagagtccaggaataaacccatccatcttatggtcagttgattctcaacaaggggtgccaagactatacaatgggggaaagaataatctcttcaacaaatagtgctgggattactggatagtaacatgaaaataaggaagttttaaccctaccctcacacaacaaacaaaaattaactcaaaataagccagtgacctaagcttagaagctaaaactagaacacttaggaggaaacaggggtaaatcttcctggtcttggatgcggtaatgaattctttttttatttttatttttgggacagagtcttgctctgtcatccaggctggagtgtagtggcacaatctcagctcactgcaacctccgtgtcccaggttcaagcaattctcctgcctcagcctcctgagtagctaggattacagtcatgtgccaacacatctggttaattatttttatttttatttttagtaaggacagggtttcgccttgttggccaggctggtctcaaactcctgacctcaggtgatccgcccacattggccttccaaagtgctgggattacaggcgtgagccaccaccccctgtcaatgaattcttaaatatgacaccaattgcacatgcaacaaaagaaaaattagataaaataaatgtcttcaagatttaaaacttctattcattaaagtgaaaagacaagaaaatgaaaagacaatctacagaacgggagaaaatattttgcaaatcattcatctcagatgatctactatcagaatgtttaaagaatgcttacaactggacaaccaaaagacaaacagcacaattaaaaataggcaaaggatttgaatagacatttctccaaaaatgacatgcaaatggtgagcaaacacatgaaaagatgttaaacatcattagttatcagggaagggcaaatcaaaaccacaatgaggtatcatctcactagtgaagtggtgtaaatacccaagtttcactgtttcacaccagggaaattgaggatgtggacacataagaagttagtttaagagtggagatttaataggcgaaagaaaaaaagaatagctctggctgggcgcagtggctcacgcctgtaatcccagcactttgggaggctgaggcgggaggatcacgaggtcaggagatcgagaccaacctggataacacggtgaaaccccgtctctactaaaaatacaaaaaaattagctgggcatggtggtgggcgcctgtagtcccagctactccggaggctgaggcaggagaatggcgtgaccccgggaggcggagcttgcagtgagccgagatcgcgcccctgcactgcagtctgcgggacacagcacgactccgtctcaaaaaaaaaaaaaggaaaaagagaataactccctctcctgcagagagacaggggctcccaagtgggtcttccggttgcgtggtgaaatgcacgaagttttatagatgagcttgggtaggcggtgtccgatttacataaggcttaaagattggtctgaacaggtgagccatttacatacagcatgaagaaactggctgccccagcctaatcttttattatgcaaatggattctctacctggctggctccacgttgcctgcttctgtactgtacacgtggttgacaaagataaaggaagagggagcccccacgttgaacatgtcgggcccccaggtaaccttttcctattggcacagctgccggcattcacccgtgcaagcttccagcttgcttttctatgtctgcagctcgaattttcaggctgctcgttattagaaaagaaatgatttgggggctggtttttattaaaagggaaaccttactgaggactctctgacccttgctaactgcctaaataatttctttttcactcctgtatcactgggatgaagagaggtgagttaacaggtagagacatacagttagacaaaaagtataagttatacatatatatatatatattttttttttttagacggagtctcactctgtcacccaggctggagtgcagtggcacgatctcagctcactgcagcctctgcctcctgggttccagcgaatctcctgcctcagcttcccaggtagctgggattacaggcacgtgtcactaagcccagctaatttttgtatttttaatagccagggtttcaccatattggccaggctgggctcaaactcctgatgtcaggtgatctgcctgccttgacctcccaaagtgctaggattacgggtgtgagccaccaagccagccacctctccgcttattaagcagatttttttttttttttttttttgagacggagtctcactctgtcacccaggctggagtgcagtggcaccatcttggctcactgcaagcttcgcctcccaggttcacgccattctcctgcctcagtctcccgagtagctgggactacaggcacccgccaccacgcctggctaattttttgtatttttagtagagatggggtttcaccctgttagccaggatggtgtcgatctcctgacctcgtgatcctcccacctcggcctcccaaagtgctgggattacaggcgtgagccaccgtgcccggcccaagttctattgtttgacagcagagcagagtgactataattaacaagactgtatgatgtatttcaaagtagttacaaaagaggacttcaattgttcccaacacatacaaatgataagtactcaaagtggtggatacctgagataccctgacttgatcgttacacattctaggcaagcaacaaagtatcacatgtacccataaatatgtaagatttatgtatcaataaaagcaattaaaaacagaacaaaagaaaacggaagtaacaagttttgctgaaggtgtggagaggataacccgtgtatgtttctggtggggaattagaatgatgcagctgctttggaaaaagtttggtggttcctccaaaagctgaacatagaattaccatatcacccagcaattccactccttagtatataccccaaagaactgaagacagttattcaacccaaaatgtgtccactaatattcataagagcactattcacaccagccatctaaacaaaaaaaaaaaattcgaagtcctctcccgcccccctcaaaaccatctgaatggacttcctttttggccagggcactctaaatttaactggaaagactagttcaggctatggtgggaagtggggggtctgacatgtgtcatgccctcctcccttttggagttgaggaaaagctgaccagcatttaacataacacagacctgaagcttaataaggaacatttaccatctattctctctgaagcctgatacctgaagagttcatctggatgatacaacttcagcctttacagccccttatcgtattccagacattcttttctatggataataactccttcaaccaactgccaatcagaaaagcttaaatctacctataatctggaagcacccgccccacacctccacttcaaattgtcctgcatttctggactgaaccaatgtatagcttaaacatatttgattgatgtctcatgtccccctaaaatgtataaaaccaagttgcgggggcaggcgtggtgtctcacgcctgtaatcccagcactttgggaggccgaggcaggcggatcacgaggtcaggacatcaagaccatcctggttaacatggcgaaaccctgtctttactgaaaacacacaaaataattagccgggcgtggtggcgggcgcctgtagtcccagctacttgggaggctgaggcaggagaatcgcttgaacccgggaggtggagtctacagtgagccaggatcgcaccactgcactccagcctggttgacagagcaagactctgtctccaacagaagacaacaacaacaacaatcacaacaagctgtaccacgactaccttgtgatatagaagttaaaaaggaattatttaggcagagagtgtgggtaaggaagtcctgggtaagtctttccttttaatgaaaatcagcccctatatcattttttttttttctaacaaagagcagcctgtaaaatcgagctgcagacataggcaagcaagctggaagcctgcacaggtgaatgctggcagctgtgccaataggaaaaggccacctgggactaggcatgttgaaaatggcggctccatcttcccatctctttgccaaccacgtatacagtaaggagctggcgaagactccatttgcataataagattagggtggggcagccagcttccctgcaccttatgtaaacgtcacacctgttccaaccaatctttgggccctatgtaaattagacactgcctcctcaagcctgtctataaaatccggtgccctctggcatgggtgggaagtcccatttgggcattcctttctctcacaagagagagagttgttctcctttctctttcttttgcctattaaacctccactcataaactcactcctggtgtgtgtctgtgtccttaattttcttggcatgaggcaatgaacctcaggtattaccccagaaaacaacaccacttcacttgggaatatgttctcaggggctcctgagggctgtgtcacgggccatggtcagtcatacattcatatttagctcacaataaatctcttcaaatattttacagagtttgactctttttgtcaacagccaaaaggtggaaacaacccaaatgtccatcaatggatggatggataaaaaaaaaaaaagtgatgtattcatacaatagaatagtattcagccatgaaaaagaatgaaatattgataaatgctatggcatgcatgaacctcaaaaccattatgctaggtgaaaggagctagactagatggtcacatattgtatgattccatttatgtgagatatcctgattaggaaaatccatggaaacagaaagcagattagcggctgccatgggttggaggaagggaggaatgaggagtggttgcttaccatgtgcagtgttcacttttgggctgatgcaagcattttagaaatagaggtgacggttgtataactttctgaatatactagattctaccgaaacacacgcttttaaaattttttcttatttttatttttaattttaatttttttgtttgagatggagtggcactctgtctcacgtagtctggagtgcagtggtgcaaacttggctcactgcaacctctgcctcccaagctcaagtgattctcctgcctcagcctcttgagtagctaggattacaggtgtgcaccaccacgcctgtctaatttttgtattttcagtagagatggggtttcactatgttggccaggctggatttgaactcctgacctcaagtgatccacccatttcagcctcccaaagtgctaggattacaggtgtgagcgcctggcattacaggcacgccccacgtgaaacagacactttaaagtggtgaacttgatgttatgtgaattttatcttaataaaattaatgctatatgcattttcatgctttaaaaattattatgcaggccgggcgtggtggctcacgcctgtaatcccagcactttgggaagccgaggcaagtggattatgcacaaggtcaggagatcgagagaccatcctggctaacacggtgcaaccccgtctctactaaaaatacaaaaaattagctgggcgtggtggcgggcacctgtagtcccagctactcgggaggctgagacaggagaatgctgtcaacccaggaggcggagcttgcagtgagccgagatcacgtcactgctctccagcctgggcgacagagtgagactctgtctcaaaaaaacaaaacaaaacaaaacaaaacaaacaaaaacaaacaagaaagaaatcatacttagagatcaaatgatattaatttatagtattccaaattaaataaattgttctcttttgaagtgatttctattttgttattttaaattcttcatcataattatttactgctgataattcatattacaatgaaaatgcatgttatttatgcatttctttttcctttcctttccttctttctattcttccttcttcctctactcctctcctcctcctcctgtgctcctcctcctctcctcctctcctccgctctttctcgtctcctcctcctctcctccttctcttctcctcctcttctccttctcctcctcctatcttcctctgcctcctctcctcctccattcctcctccttctcctctcctcctcctcctctcctcctccttttctcctcctcctctctttctccattcctcctcttcctcctctcctcctccttctctcctcctcctctcctccccatcctgtcctcctcctcccgtcctcttcctcttgtcctcctcctcccatcctctttcctcctcttcctcctcccctcctctcctcctgtcctcctccttctgtcctccccctcctgccctcttcctcctttttcttcctctttatcctcctcctcctcttcacctcctcctccttctcttcttcttcttcttcctcctcctcctcttcgtcttctcttttttgagatggggtcttgccctgtgaaccaggctggagtacagtgatgcaatcatagttcactgcagactcaacctcctgggctcaagcgatcctctcacctcagcctcccaactagctggggccacagttgtgccatcacatctgtctaatttaaaagatttttttttttttgtagagattgagtattgccatcttgtccagactggtatgtatttctttttaatctcttattttagtttgtcgatgagagtaacactgatatacaggtgtggtcacttggctctggtgggactgggaaaggaaggagacagaaaacatgcagagctggagtctggggcagacccagggacctacctgtgcctgcaggataactgaagttcaacagcccattggaaaggttcttgctcaggcctctgaggacatcctctaggccatccagcaggtgactggccacacagtgctgctgtaagcggggcagggtctccaggtccccaggggcctccagcagctcatccagcgcctgtaagatgctctggagggatgtggacacagacctagtgagccatgggccagagggcccgcatgaagactccaaccgctcagccccagggaacagatcctagagactgtctatctgggggatgaagatggcattggcggctgggcgcggtggctcacgcctctaattccagcactttgggaggccgatgagggtgggtcacaaggtcaggagatcgagaccatcctggccaacatggtgaaaccccgtctctactaaaaatacaaaaattagccgggcgtggtggcgtgtgcctgtaatcctagctactcagggggctgagggaggagaatcgcttgaacccgggaggcagagactgcagtgagctgagatcgggccactaaactctggactggcgacagagtgagactccgtctaaaaaaaaaatgacattggatgggattccctaggtgatccttgactctggttatggcccctcagaggccaacacttctgtgcaatatcaatgctgacctaaacccaaagtccagggaaagcaagaggaaagatattaagtgcacttgggtgtccattagcttccaccagccctgaaagatgctgggagtcagaccagcacccactgcattgggtcctgtcccctcccagacccaaactgccccaggcctctgtgggatgcagccaccttcctgcctcgcccccttgccctgggtcctgtccttacctggatggtgttattggccaagcctggcttgtagtctctgcccaggtcctggactttgtcgaagaatcgggaaagcgtctgcagagagaggagatgtgggggtcagagagcctggacggcgggtgggaagtttagaacaaggagacggatgcagtgctgtgtggatggagttcccgccgcctcgtccctgtgggggccactcacctggctgtggactccagggggcggggtccaggtggagaaagtcatatctgtagggaacaagacaagcggctcattaggcgggagcgtgtcagtgtgtgtgctgggggtggggagcttctagggccaggtcataccttcacagacagtgtccttttggttattcgggattccgtgtctgggcttccagcctgggcggcagcggcagctgtatgaacccacggtgttgaagcagacggtggagctgtcacactgatgctgcccggagctgcactcgtccacatctgaggacaggaagaagggggtcaggtcctgtcccagcctggagagggtcctgtctcctgtctgtgcccccagctcgttcctcccggcattagtgccccccttggagaggtggacgctgggttatggaagcgtggagaggcctgggcacagcaggtgggccccgtgcagatgagcaggttatgaatatggtgaaacgccttcctcccagtgagtcatcagctgttgcctggggtccccctgagcctcccccctcagtaccccagctccttccgcaggacccttgctcttttctcatctagcctcagaagaatgaacgcctgacacagtcgggcgcctccagcgctcattctgcttggtttgtgtgggcgccgttgaacatgtgatcagatgtttgtgggtctctgggaacgtgggatctgagctctcgaccttcacagacggtattgtttgggccattgggggaccccggaatcggttgccagcccgggcggcagcggcactgatagctgcccacgttgttgaggcagtgggtggagctgtggcatgggttttgtccggaggtgcattcattcacatctgaggacaaagccagagggtcaaaccctgtccctgaccagcctgggcctgccctccactcactgcacccactcccctatcttttcattgcctcagactgaagaccattattgcacgtgccaccacttggtgaccttcaacttcaccttcaaagcatcttatgatggtcttcctaccagatgggcacagcagggaccatggtccccagtttataggaggtgaaaccaaaagggaaactgagtcatgggagctggactttctgactaaaatctctctcctgctccctccctcactatggtggaggttccccttcttagaactggaagtgacaccttcttccactcgcacgtgacagatgaggaaggggtgaggtctgggggcccacaagggcactccaagccctgaaggccctgccgcctccctgccgtgtggcgagtccttcctgggaggtgaatccttaggcaggggcttagcaggtccttgaccttgtgggaacctgcggatcttctccctcctcctcggctgctttggaggacctgactcagctccatccccagctcccgtccagcctcacagcgtcttcctggggcctctacctgtgcagagcttcgggtcctcaggtttgagcttgaagccaggcaggcactggcacgtgtagctgccgagggtgttgacgcaggtgccgtagcttttacagagccttgggttctgctgacattcgtccacatctgcaagaggaaggagagggtgaagaatgcccgtagctgtgagcagctttcggggctgagggtccgccatgtttcctggcacggaagcatctggaaggcaccactgtctgctcccttttcttttctttctttcttttttttttttttgagacggagtcttgctctgtcacccaggctggagtgcaattgcctgatctcaactcactgcaacctccgcctcccgggttcacgccattctcctgcctcagcctcccgaatagctgggactacaggcgcccgccaccatgcccggctaattttttgtatttttagtattagacggggtttcaccgtgttagccaggatggtcttgatctcctgacctcgtgatcagcccacctcggcctcccaaagtgctgggattgcaggcatgagccaccatgcctggccatctcctcccttttctaatccacacagaggtgtcccatggtgagcatggtggcccaggccttctgttgttcagatatggctggaagcatctgagtcctccccatctcccctgcctccctgggcagctcccagctggggcagggatgtcccagcctgaggattcaggacaaaggtcagggtgggattttcttgggaccaagtgcagggggcatgctgcttgcccaggtaggacctgtcttggttcccagtggcagtcctgggccaaaggacagagccttcctgtgaattggaaaaaggcatctcctcttcaagtagtcacagtcatatttgaggaatggagagtaggcaggttttcagcttctgctcaccctcttggctgggcatccatatgcagtcagcagcctatgcaactgtacatggtggtcatgggtccttctcagtgagaaccctctggtttagtccgttttgtgttgcaagaaaagaagtttatttggctcatggttctgcaggctgtgtaagatgcatggctccagcatctgcttctggtggccttgatttccccaggacagctgctcactggctgagttatcagaatcccggtggccctagcaggatggtgctctcccatccacactagctctgagagcccagctccaggcacatggaccaagactggcccctgagccagtccccaggggagcatgagtctggtgctgcataggccagggctgcctggacagtgggtcccaggccagggtggacagtggggaccgacatacagctgggttgccccagggctgtgaaggtgcctttttttgatcctcaggaaggtgtcttggaaatggcaggatgtagtgagaatccatagctgagaaagactggccctgggtgaaggtttagtggctggagaggggcacagatgctgatgggcaaagatggaggtgtatctgtcatctcatctcttggcattccaccagggacacagacctatttctgaatggttccactcccatgggatctgggttgacctcctgggagaggatcaggcttggagcaatggccctgatgttaacctctcttgccattgggtccacactagtgcctcttccattcactcaactctccaagtatggggagtccatgtcactgtgcccaccgttagccacaacatcctccagtgcactcaggtggaccaaaactatcaggaagggtcagggcagtctcgctcagtgaaagggacagagactgagtggcagaaaaagaggtcagggctccacgaggcatcttctccaggtggggttgttggccagtggcaggttcgactggggacagtggccctgccttcaaatctccctcctccttcatttctggacagggtgcctgggtccatgatgagctgggggatcagagagagttccaggtgagcagagctgtgtggagactgtctcatcctggcagtcgctgatgatagcagagagaatggatactgcgctggaatgcaccacgcagtgagctcatcgaatatcctgagtgccagccccctttttgttttgtacaaataagataccaggtcggacatggtggctcacgcctgcaatcccagcactttgggaggctgagacgggcggatcacttgaggccaggagttcgagaccagcctggacaacatggtgagacaccccccccccatctttactaataaaacaaaacaaaacaaacaaataagatgccagatgggcagggggatgttctgagcttttggaagtgaccctctgtggagggttctgaaccttgaggtttggatagcgacaggtgaccaggtgtttgggacggccctgtgatgcctggagtaagtggggcaaggagctgagggagtggccccaggtctcctgcctatgaggcctgtgacaccaggtagacaaaaaaaacaagaatgctgaggggtgagggggatgcagacagggccccacggagcccttccctgagctgaggcttcaagaggcaggtcctgctccgaactagcaggctgttctgtgcggatggggtccatgagagccctctcccacttcattcctgctcatctgtgtctctgcctatccaccaactaagccccctctctcagtgttggcctcttttcttttctctcttctcttctctccttttcttttcttttttttggagacggagtctcgctctgtcgtccaggctggagtgcagtggtgccatctcggcttactgcaagctccgcctcccaggttcatgccattctcctgcctcagtctctgattagctgggactacaggcacccaccaccacgcccagctaatttttttgtatttgtagtagagacggggtttcaccatgttagccaggatggtctcgatctcctgaccttgtgatccgcccacctcggcctcccaaagtgctaggattacaggcatgagccactgcgcccggccagtgctggcctgtttctaacatggcaacacacctcctcaataattacaaacaccacctgtgcatgcggtgatacagtttggatatttgtcccctccaaatctcacgttgaaatgtgatccccagtgttggagatggagcctcgtgggaggtgtttgggtcctgagtgcagatccctcatgaacatctcggtgctgtccttgggtcatgagtgagttctcgccttgttagttcccatgaaaactgcttgttggaaaaagcctggtatctcctcccttctctcttgcttccttcctcttgccatgggatgccagcttcccctttcccgtctgccaagagtggaagctccctaaggccctcaccagaagcagatgctggagccatgtgtcttacatggcctgcagaaccatgagccaaatcagcttcttttctttatacatgatccagcctcatgtattcctttatagcaacacaacatagactaaaacagaggctctcactgacaaggacccatgaccaccacgtacagttgtgtaggttgctgactacatatggatgcccagccaaggcggtgagcagaggctgaaaacctctccattccccaaatggggctgtgtctacctggagaggagaggcttttctgtttctctttttctttttgtttctttcttttcttttttttttttttttttttttttttttgagacaaagtcttgctctgtcacccaggctggagtgcaatattgagatcctggctcactgcaacctctgcctctgggttcaggtgattctcctgcctcagcctcctgagtagctgggattacaggtgctcaccactatgcctggctaacttttgtattttttagtagagatggggtttcactatgtttgtcaggctggtcttgaactcctgacctcaggtgatccacccgcctcagcctcccaaagtgctgggattacaggcgtgagccactgtgcctggcccggagagtcctttttctaattcacaggaaggctctgtcctttggtcaagatatgtgcatgcaatgtagcatctgttcacaggggacccctgtgaaccagcccccctgctgggctctatgcagctgcgtgctctcagaacgtacacctctgctctgtcctcactttcctcccaccagggaggctctactgactgcagggagaacaggagggacagggctgggaacaggagcactgccacttttctctttacagcagggcaggtctgctgaacccccttaatgtcccctgggacccttggctcagcctcagcttcttcatttcctgcctttgctcaccttcccttcccactctgtgtactctgtgttaatctcccttctctgtccacctgctactggttcccatctggccttgcagatgtctgaagctccctcccgcacccaactagttcccactggaaagaaggcaaagcagagtgatgcatgggggcctggcttctcatgggctggagctgcagtgtggaataagaccatggcaagggatgaggcaggctgtgtcgaaatagatttcttctgagtgccagccaggagtgtggccccacaggagcccagcttgtctgaacaactcctaaaaggcatccattgcttatttatttatttatttatttatttatttatttattttagatggagtcttgcactgtcaccaggctggagtgcagtggcacgatctccgctcactgaaacctccgactccctggttcaagtgattctcctgcctcagcctcctgagtagctgggattacaggcacccaccactgcacccggctaattttcgtacttttagtagagacagggtttcaccatgttggccaggatagtctcgatctcctgaccccgtgatccatccgcctcggcctcccaaagtgctgggattacagtgcataataacgtttaaagaatgaagatgcctgtagcacctgctgtgtgctgggctctgttagaagcacctattctttccttggtcctcctagaaggcataggagtaggccattattatcatcctcattttatagatgggtaaaccaaggctctaagagcagtagtgatgttggtaatatcatttaggtaacaggtggcaaagccaggatttgggcccaggtagctggtcccagagttttcccttggccttcacaccacgctgcctctctgggctggcgaaacaggtacatgcacacctgtctcatctcagactccaggaactgaacctatacttgggtacctgctccctggatgctgcagaaacagctctggtgaccccaaacctcatggacagtggtgatggaggatgtggggtggttcttaccttgacacgtgttctcgctctcattcttgaatgtttttgccccagaaacaggctcatatcctgggctgcacacgcagtcgtagctcccctctgtgttccagcagtccgagaattttccgcatgacactttcgacagtgttgcacactcgttgatgtctggaacacaacaggacaggaggtcatctcccaaagatgtgagttccgtcagggcagagacccccgtcctgactccccaacatggggcctgctgcttagtatcttttggaaaggatctcaagttgcactgcacaggctatgctgcagctggagcaggccattcctgaagaccacacttgatctcagttctctggctggcatcctagatttggacacagtggacagtgctgaggtgggggatggacaggaagcgccatatccccatccccagtctttttgtagaaatttaaaccccatggcagccgggtgcagtggctcatacctgtaatcccagcactttgggaggccgaggccggcagatcacttgaggtcaggagttcgagaccagcctgccaacagggcaaaaccccatctctactaaaaatacaaaaactagccgggcatggtggtgcatgcctgtaatcccagctactcgggaggctgaggcagaagaatcgcttgaacctgggaggtggaggttgcggtgagccgagatcgcgccactgcactcctcagcctgagcgacagagtgagactccatctcaaaaaaaaaaaaaaaaaacaaaaaaaaaaagaaaaaagaaaaataagggagaaaaaaaaacctatggccagaatgtacccccttcccagtcttaacggtaaactgaggcacagactccagattcctgagcacgcagcttctctctctccaggaagccatgcctattcacttcttacttctcccccttcatattttttcctttttcctcccttccttccttccttctttcctccctccctccctccctcctttcctttttctttccctccctccctctctctctttttcttttcttctcttttctttctctccttctctctttctgtcttttttttttttttttgagatggggtcttgctcctgttgcccagacaatccctcccaaagtgctgggattacaggcatgagccaccacacctggcctctttctttgtttctttctttttcctgagacaggatctcactctgttgcccaggctagagtgcaatggtgcaatcatagctcactgcaacctcaaactcctgggctcaaacaatcctcccgcctcagtcttctgagtagctgggactccagatgtgtgccaccatgcgcggctattttgtgtattttttgtagagacagggtctcaccatgttgcccaggctggtcttgaattcctggcctcaaatgatccacccgcctctgcctcccaaagtgctgggagccaccacacctgccctctttctcttttctctggccatgatgatagtctggaaggtaaggctgtggcccctcacaacaacctctgtcccccactggcactgggctatgcctcataatcgcagatgtcccctgcgctgccctcaagcctctgtaccgtcacaagtctccatgggggtggtgatgatctcagaaaaagagctgaaccctggattgcagcgacaggcggtggcattgacacacgaggagtcctgagggcaccaccgggcacagcctgcaagagcagggagcacggtcagaaggtgaggggtaagggaatacacaaaaagggggcactgggggagatggggcagagcgctgagtttcccgtgcacgagccctctctttccctgggctgaagggggctgggcgggggtccaggaccctccccaggctctggctgtggactgtgctttctgcttcccagcagactcacccctggagtcctgggtttcagctcccggcagagtcagccagacacagaatgctgcaacagagaaaggaaagggggtcagaggggatcccagggtgggaaaggaggcgtaagggtgatgcactttgtgggaggaggatgctgacccctctcaggctcagatcctgcccatcgttcaaacagagtgagcagatgtcacgtcccactcggatgctcaaagccagagagtctgtcaccctgtcctcatgggggtgggttttgttttgttttgtttgacacagggtctctctgggtcacccaggctggggtgcagtgatgcgattatagctcactgcagcctccaattcctaggctcaagcgatccccctgcctcaccctcccgagtagctgggaccacaggtgagtaccgccatattttaaattttctttctttctttttgagacagggtcttgctctgtcgcccaggctgaagtgcaatggtgcgatctcggctaattgcaatctctacctcctgggttcaagcaattctcctgcctcaacctcccaaatagctgggactacaggcacccaccatggtgcctggctaattttttgtatttttagtgagatggggtttcaccatattggccaggctggtctcgaactcctgacctcaggtgatctgccggccttggcctcccaaagtgctaggattacaggtgtgagccacggctcccagctcaaaaattttaaaatgatttatttatttttattatttatttttttttgagatggagtctccctttgttgcccaggctggaatgcagtggtgcaatcttggctcactgcaatctccacctcctgggttcaagcggttctcctgcctcagcctcttgagtggctgggactacaggcatgacccaccatgcccagctaatttttgtatttcttaagtagagatggggtttcaccatgttggccaggctggtcttgaactcctaacctcaggtgatctgcccgccttggcctctcaaagtgctgggattacaggcatgagccatcacgcctggccaaaaaaattaaaaataatttaaaaagttattttagagacagagtcttgctctgttgcccaggctgatcttgaactcctggcctcaagcgatcctcctgcctcagcctccctagcttggcttgggggtggggtttaaggaactgaggagtaggaaagggccatgagcctggtgggggtctcagctccagctgccgctcttctgacttgggggctgtctggtgtgcctgagcatttactgccatcttcatttctttagataaaaatgaaggcatggtcaggcacggtggctcgggactgtaatcccagcactttgggaggccaaggtgggcagatcatctgaggtcgggagttcgagaccagcctgcccaatatggtgaaaccccgtctctactaaaaatacaaaacattagctgggcgtggtggcagactcctgttacccaactacttgggagattgaggcaggagaatcgcttgaacccaggaggcggaggttgcagcaagctgagatcgtgccactgcactccagcctgggcgacagagcaaggctccgcctcagaaaaaaaaaaaaaaaaatgatggcgctggatcccccaggctctaagatgccctggaaccgcatgcttcctcagggacacaggtgcacacacaccacaaccgccgccagccctggcggcccatcctgaaacccagtggtgatatttcaccccgggcgcccctcccacaggaaaacgctgtggccgcctgttggggtgcatgtggcgctgcggttcccagcactcaggaagttcccctttccaaggcatgtcctgggggaccctcctcaggtcaccaggggctttagagatggggacctagggatctccttgttgttcaccagagagagagacaaagaggcagaggtagagagaaaacggagattagggagatagagagactgaaagagagacagaaggagaaagacagagagagagagagaaagaagggagaagctgggggtaccctgcagtggagaagtcctggcctctattttccccgccccccgcccatgtctttctatgcgctatattaagagcagtggctctggggtcctagcactcactttttgcccctttccttcccccgtgcctcagtttcccctcttatggagcagatgccaaactggctccagtagaaagcttgaggatccctccgggcagggtagcaggctccgagagcaccctggagttcctgccggggtgtgggggtgcccaagcaccaccagcccctctcgccgtgtgcccgtgagtgcctgcttgaccatgtggctttctccatcgccggccccacagacaccagcggcgcctcccgtttctcagacgcatccaaggggtcccgctggagcttcctcgctaccacccccagcggggccccaaagtacttaccgagaaagacgagaaagacgcggcctcccatggttccagctgagctgccggcaggagcagcaggggaaagagtgagtgggacagggctgtcccgtctccgcaggctgggcagctgtgcgggctgtcccgaggccaggactttataaaggagggggggcggacagccgctggcccagggccctccccggaactggcggtgcagctggaagccagcaggaaagcacaataaaaacacagaaccaggggcgctgcacacacacacacacacacacacacacacacacacacacgtgtactcgctcagcaagaatgaagtgcaacctgctttaaaaatccctctgctggagtttccaccatgtggctctgaccaaccctctggcctctgtgtgttccaggctggctgctgtgcaggggaaggtgtggcagccgggcggggcggtctcgcctggggccacttggctcttccctgggcaggcacgcaggggccttgtcagaaatagctctgggctcccactttggtagggctcaccctgtgcccagagctttggcatgccagagttggcagagcctgcgtcccagctggcagtatcttcccctgctgttttccagatgaggaaactgaggccaggtacagaggctcacgcctgtgatcccagcactctgggagggcgaggcaggaggatcgcttgagctcaggagtttgagaccagcctgggcaacatggcgaagctcggtttctttctttctttttaaattaattaattaattaattaattaaattttttagactttaagttctagggtacatgtgcacaacgagcaggtttgatacataggcatacatgtgccatgttggcttgctgcacctatcaactcgtcatttacattaggtatttctcctaatgcaatccctcccccaggcccccaccccccgacaggccccagtgtgtgatgtttcccgccctgtgtccaggtgttctcattgctcagttcccacctatgagtgagaacatgtggtgtttggttttctgtttctgtgttagtttgctgagaatgatggttttcagcttcatctgtgtccctgcaaaggacatgaactcatccttttttatagctgcatagtattccctggtgtatatgtgccacactttcttaatccagtctatcattgatggacatttgggttgattccaggtctttgctattgtgaatagtaccgcaataaacatacatgtgcatatgtctttatagtagcatgatttataatcctttgggtatatacccagcaatgggatcgctgagtcaaatggtatttctagttctggatccttgagaaatcaccacactatcttccacaatggttgaactaatttacattcccaccaacagtgtaaaagcgttcctatttctccacacctgtgatcccagcactctgggaggccgaggcaggaggatcgcttgagctcaggagtttgagaccagcctgggcaacatggcaaagctctgtttcttcaaaaagaaaaaaaattacctgggcttggtggcagacgtctgtggtcccagctgctactactcaggaggctgaggcaggaagaatcacccgagctggggagtttgaggctgcggtgagctaagatggtgccactgcactccagcttgggtgatagagtgagaccctgtgtcaaaaacaaaaagaaagaaagaaaactgaggcattacagtgtccacataaaagcccagggagggagaaggggccctcttccgatgccaggcaggtgccaagaagagaagcttcaccgcacagagcagaccccccggatctttctggtctttctaagccagtttcctcctgtgggaaacttatatttcagaggcccctgggcacttcgttaatcaacagagaatcatgtgataggagggttctttcctttctggataaatcatatgattagcttgtctcttgaggtacgtaatcattttttaaaacgctatatatatttttaagagatcttactctgtcacccaggctggagtgcagggtcaccatcacagctcactgcagcctcaaacttcagggctcaagggatcctcctgcctcagcctcctgaggagctgggactacagctgtgcaccatcacgtctggctagttttctccttaagtgttttttttttttgtagagacgagatctcgctatcctgccaagaaaatgctattatttatggagcacttaatttgtaccaggtctggtcctaagtgctttttttttttaatctatattaactcatttactccttaaaacatctgcaatgatgttgtcattcccatttgacagaggaggaaactgaggcacaagtgactcacccagctgagactcagatccacaggccggcagcccagccctggagtccctgcgatgagcccaggggaaagtctccactgggcactaacatgtctttagcgcctccgtgaccctgaggcttagcaggtgtctgtatccagccagaattcaaggacttggttttgtgttcctcatatttatatttatttttaggtttccctactatctggggcaatgaggagggtttttcagtgaggatgccgaaatcaagtctccttgttacatgagtaaattcaagatgcagaagtgatgaatgctaaggaaaatatagttcagttgttcaaagggggagattgcagcgatggagaaaaaagtcactaatgactgaagtcagagaactattgtcctgggaataatcaaacatccacagtcctagaatttaccccttcctgtcccgggctcctgtgggggtggcctgggctgtgggggaggggagtgaacaccagcagaagctggaaggagagagggccagaccaggtctggagggattttgccttttttttctcagaaagccagaaactccagctagaaccccagggctcaacgtcccttctctgcagatcagacgggcaggtcagacagctggcgtctgcagaatctcagggaggtagtggcacttcctgatgccagggattgtccctacaccccttcatggtgatcatcgactcttcttaatttaattttattttactgtattttagagacagactctggtgttgcccaggttggagtacagtggcgccatctcgactcactgcaacctccgcctcccgggttcaagcgattctcctgcctcagcctccagagtagctcggactacaggtgcccaccaccacacctggctaatttttgtatttttattttattttatttatttgttcattcatttatttattttgagacagagtctcgctctgtcacccaggctggagtgtggtgatgtgatctcagctcacagcaacctctgcctcctgggttcaagagattctcctgcctcagcctcccaagtatctggaattacaggtgcaagccaccacgcctggctaatttttgtatttctagcagagatggagtttcgctatgttggtcaggctggtctcgaacttctggcctcaagtgatctgcctgccttggcatcccaaaagtgctgggattacaggcgtgaaccacaatgcccggcctgaaacattctttttaaatttttattttattattattattattatttattattacttttttctgagacgaagtcttgctctgtcacccaagccggagtgcagtggtgctatctcgtctcactgcaatctctgcctcccgggttcaagcaattctcctgcctcagcctcccgagtagctgggattataggcacctgccatcgcatctagataatttttgtatttttagtggagacagggtttcaccatgttggccaggctggtctcgaactcctgtcctcaaatgatccacgcgcctcagcctcccaaagcgttgggattacaggcgtgagtcaccattcctggcggctttcttgagtctctccaatacttctcaccatctcccttcttccctagcaaccatctgccctcgagccgcattaggctgtcagccccctgagtgacttttgtctttttctctgcagagcaccagcacagagcctgtgctgagtggggccctatatggtaaaccatgcaaattagtagtactcctgccactccactccgctgccgcccagctaaaggaagcctccttcagcctcgctgatctggtccctgccggggtgtctgcctatgtttctccgccttctctttgtccagaagtctcagtcctgctgacctattttgcagcttctggacaacctctgcaatgatggggggtgcgaacatggtcctcatttgtcaaaaggggaactggaacctgggggtttggggcccctggccccaggttgctcagctaagaagtaacccaagattacctgtaatcccagctgcttgggaggctgaagcaggagaattgcttgagcccaggagatgtaggttgcagtgagctgagatcgcgttattgcactccagcctgggcgatagagccagactccgtttcaaaaaaaaaaaaaaaaaaaaaagaagcaacccaagattatccaaccaacaataataatggtattattaattatattagtataatttattgttattattttagagacagggtctctgttgcccacgctggagcacagtggcggtggcacaattatggcttcaggcaacctgcacgtcctgggcttatgtgatcctcctgcctcagcctaccaagtagctgggactacaggcatatgttgccatgcctggctaacttttcactttttttgtgtgtgtgtgagggggacggaatcttgccctgttacccaggctagagtgcagtggcgagatctcggctcactgcaacctccgcctcccagcttcaagcaattctcctgcctcagcctccctagaagctgggattacaggcacacaccaccacgcccagctaattttttagtagagacggggtttcaccatgttggccaggctggtctcgatctcctgaccctcaagtgatccgcccacctcagcctcccaaaatgctggggttacaggtgcatgccaccatgcctagccacactccttttttaaatttaaaaactgagtgaagtcaggagaaaaaaatcttaaattgcagcatgacagattccatactagaatcttgaaaaagtctccaaagccccataggaaaaagccaccttgcaaaaaagctgagatacaaagataataaaagatttggtttcaggatacaaacatatgcaagaagactttaaaaaataatcaaggctgccgggcgcggtggctcatgcctgtaatcccagagaggccgaggtgggcagatcacctgaggtcaggagttcaagaccagcctggccaacatggtgaaaccccgtctgtactaaaagtacaaaaattagccgggtatggtggtgggtgcctgtaatcccagctacttgggaggctgaagcaagagaatcacttgaacccgggaggcagaggctgcagtgagctgagattgcgccactgcactccagcctgggagacaagagtgagactccgtctaaataaaataaaataaaataaaaatacataaatataaataaataaataaaaataaacaaggctgggccgggcgcagtggttcatgctcgtaatcccagctacttggggatgctgagacgggaggattgcttgagcccaggagttcgagaccatcctgggcaacataatgagacctccatctctacaataaaaataaaaaattcgccaggtgtggtgactcgcacctgtggtcccagctactcaggaggctgaagtgggaggatggcttgagcccaggaattcgaggtggcagtgagctgtgatcataccactgcactccagcctgggtgacagagcaagaccctgtctcaaaaataaataaaataaaaaaataagtaactgagcaaaggaataaggtgcaaagaatattcagagtggtggtaatcagcaagataaagatgggagcatgggaacaaggtcatgtctcagttcttggtgatgagggaggctcatgggtatgccttccttcccttttattttttaatttacatattttttgcaaagcaaagttctttattcccgcaaattgtgaacaatacacatagtagtttccacatatgaatgtttcctaaaatgatggctgttttgttttgttttcttgagacagagtctcttgctctgtcgcccaggcaggagtgcagtggcacaatctcggctcactgcaacctccgccccccgcgttcaagccattctcctgcctcagcctcccaagtggctgggattacaggtgcacaccaccacgccaggctaatttttttgtatttttagtagagacgggcatgagtcactgcgcccagccaaaatgatggttgtttaacgtaacgccatgtaatgcaggcatgtggtgttttgcggttatattcacatgtgattttatcagggaccaaagcaaaaacaaagagaattctgaaaagagtttgtatcaaggaagataaaatcggccaggcagagtggctcatgcctgtgatctcagcacttttggaggccgaggcgggaggatcccttgagcccaggggatcgagaccagcctgggcaacatggtaaaactccatctctaccaaaaaatgcaaaaattagccaggagtgatggcatgtgcctggaatcccagctactcacggggctgaggtgggaggatctcttgagcccaggagttcaaggttgcagtgagctctcgccactgtactccagcctgggccacagagtgagactctgtctcagaaaataagtaagtaaaataaagctgatcatggatagaccgatggtcccaagaattacattgtttcatgaattatataaacctgaggctctatacaaatatttaaaaaagaattttaaaatgtgtaaaggttttaaggagaagcgattagaggaagcaaaggagagagtagggtgggggaggggaacagctcaggggtggctgtgggggtggggaactggtggcagccaacaagaagccctgagctgggaacgctgtgtgacatttggtggcatttttatcaccttcttgcagctctcagtgtcttccccattttgcaaaatcttctgagcagggtggtgccgatgtcccgataaggatggggtcaggcttctggggggcactgtgaggatgggggtctcagaatccttcccttgactttcgatgggtggggaaggccaggggaggaagggggcttattcaggctgggtgcccacccgggtcaacccctccgcatgcctctgggcctcttctgttgtgggcttgtgggttcccgagaattagggccatggatggcactgacggtcccagccagtaccagaaagaaacgatgggaaagcattgatgagaatcaacccatccccagggctctgtccctcggatggaggtctccctttcacttctttccaggcatagaaaacagtttgcggctcctcaaaaagttacttgcagagtgaccctgtgatccagccattctgctcctgggtatacacctgagaaaactgaaggcagacactcaaacggatacttatgtttatttttaaatttaatttaatttaatttttttgagatggagtctctctctgtcacccaggctggagtgcagtggcgtgatcttggctcactgcaacctccacctcctgagttcaagctactctcctgcctcgcctcccgagtagccgagattacaggtgtgtgccaccacccctggctatttttgtgtgtgtgtgtgtgtgtatttttagtaaagacagggtttcaccatgttggtcaggctggtctcaaactcttaatctcaggtgattcccttgcctcggcatcccaaagtgctgggattacaggcgtgaagcaccgcacctggcctcatatagttactttttgtgtatggttatgacgtagggtctaagttctttcattattattattattttttgcatgtgtatatcctattcttgggaaaatttaaaggggattatttctgtttctggtaacgcgcgcgttcatcctgtgctcccctgcctgtaattctcccactagggtcagagtagggctggaaaagcgaaaaccataactagaagagacttccccaacaggatgttgcccaaccctggcagggctgacgtccagcctccagggtccttaccggcagtgcagtcacagctgtgactaaacccagccacccacagcctgacgcccccacacccttgaccttccctttagcttcgggcttgagcaggcctttgatactcaaatagagaaaggagacagcaagacccctgtgccttctcagagggggcacccccttccccgatgccttcacgggtcctgcctctccgggacccagcttccctcctggccaccccaccacctccccagccacacctcatttccacccatctagagagggtgaaacacaaacactcctggcagccctgcccgagtgtgtcctgggacatggtggggtgggggctccccgactcctgggaaggggaagtctggggtggcctgtcctcccagctcctcgccccactggttcctctccccatgagtcatgggaaaaagcaacaaaaccaaccgcagggagatataatatctcttcctgtatctgtgacagctgtcttgttggtctggccgtctgttcttcctgtgagcatctgaatccgttcagaccaagctcttcctctccttgagcaccctctatggctcccaccttacccagtaaaatccagtcttccccaaggcccacaaggcttggctgtgtgatttgccctgtcacctccagctctcttcccctcattcacttggctccagccacagcaccttcctcactattccccaaacaaatataccaggcccagtccagcctcagggcctttgcatgtgctgttttcgccacctggaatacctttccctcagaatttttttttatcttttaattattttgttttttgagacagagtcttgctctgtcacccaggctggagtgcagtgacacgatctcggttcaacctctgcccccgccccctgcctccccgttttcaagcaattctcctgcctcagccccctgagtagctgggattacaggcgcctgccaccacgcctggctaatttttgtatttttagtagagagggggtttcaccatgttggccaggctggtcccgaactgctgatctcaggtgatccacccgcctcggcctcccaaagtgctggaattacaggcgtgaccactgtgcctggccgagacactgcacctggcctcttcttacttttagagacagggtcttgctctgttgcccaggctggagtgtggtgttgccttcatggctcactgcagcctccacctcctgggctcaagtgatcctcctgcctcagcctcctgagtggctggggttacaggcccgagccaggcctgttctgtttcttctctgtactcgaaacctacagcaatgctctaggtttgctcaatacacacagtagctgctcaataaatgtgcataaataatacatgaacgatgagttctagctgggaaatgacaactgggaaaagtgggatgtggaggataatttaagagatgagagctgtttccgaaactcctggggggcctgaggcgcccggatcggggagaaacgggggcgaccatccacttccccggcagtcgcacgcacctccccttggcggcccacagatggcgctggctccacgcgctgcagcggcgggaagccggaggtgggaaaacccaagctttagccccctcccctgtctggctgctggggtcagttcctggcccggattaggatgccaagcccgggcaccctgcttggggtcccacctcctggtagacgggctttttggtcaaatgaggggaatctgagaagagtgggggtggtccactctgtggtcctccctctgtccacgcatgctctgatttccccattcctaaaactagttcagcagctccatgcctgggggaggggtgaacgcacttaaccatgttcgtgttctgccttaactttatataggttagagctgggcgcagcgcttggtgtcagtgggtcctgggtgcacatttgtggaacagtgaatgggtgaatccctgttttacagatggggaaactgaggctcaggaaggcgatgcggctcacccaggttcatagagccagaaaatggcaaggctgggatcggagacaccaggcctgcgtgagtccagagtcagctcgttttttttttttgattgtttgtttgcttggtttttttttttttttttttttttgagacagggtctctgtcacccaagctggagtgcagtggcaggatcttggctcactgcaacttccgcctcctgggttcaagcgatctcctgcctcagactcctgagtagcggggattgcaagcgcgtgccaccatgcccagctaattttttgcatttttggtagagacagggttttaccatgttggccaggctggtctcgaactcctgacctcaagtgatctgcctgcctcggcctctcatagtgctgttgcccaacctcaaaaaacgaaaacgggaagtttttgtcaacaggagcgtgggaaccggaaatccttgcttccgataccggaagtcagagaccacacatttgcagggagcgaaattgaggtcccagtgcgggggcctgcagaaatccaggaataggactcagggatctagggctgggatgttggtggttctgagcgcccaggaaataggagttctatgagagtaagtatgagaaattggaagaatgcagagcttggaaaggaattggagggagtcagagaatgagggagactactgtgagctgggagggaccagccagagtggcgccagtgtcccgtggttcaggagttttgataagagaatgcaataaactagaattgcactagagttaaaaaaaattaattatagtttatttttttgagacagagtctctctctgtcgccaggctgaagtgcagtggcaggatcttggctcactgcaacctcggcctcccaggttcaagcgactctcctgcctcagcctcctgagtagctgggcctacaggcgcgtgccaccatgcacagctaatttttgtatttttagtagagacggggtttcaccatgtttgccaggatggtctggatctcttgatctcgtgatccgcctgccttgacctcccaaagtgttgggattacaggtgtgagccactgcgcctggcccaattatagttattttaaattccctattagtttatttctaagtctggtttctgctgatttctctgtggtttgtgttttcttgcttttgcttgtgcttcataatgtttttcgagacggagtctcactctgtgcccaggctggagtgcagtggtgtgatcttggctcattgcaacctccacttcctgggttcaagcaattttcctgcctcagccttccaagtagctgcgactacaggtgcacatcatcacgccgtctaattttttggatttttagtagagacagggtttcgccatgttggccaggctggtcttgaactcctgacaggtgatctgcctgcctcggcctcccaaagtgctgggattacaggtgtaaaccaccgtggctggcccgtgtttcataatttttgattgaatgctggacaatttgtgtagggcagctgacaatgaggtattatttatgactggaaatgagcacatctttatattatttctcctaagctatttttgtgggaggttaagtctgtctggaatcaggttaagtctgtctgtaatcagtgaaccccaggcttcagtttatttgagtgttactttggtgtcttgtgttggggtgagggctctctttgcaagagggtttgtttgtctcatagttgttctaccttcagctgtggctcttccctatgtagctgcatttcagagagagtctctccacattctttgcactcctgcagagttctaatactttcatcagtgaccactcttggggctattaaattcattaaaaatttagatgaattcttcttagtcacttgtattgacacccagataacttccttttgtgctctgccttaggttcgccactactccttatggtctctctttagacactcctgtctttcctttggtttcaggctactttcttgtcccattacctctgttctctaatgggttcaagaaaattaatggttttgtagtttatttggattttcttattcttgggtttggagccatactcattttcattttctattttctaggcagaagtagagatcccctccattttttcctaacgttttaataattttatttttaatttttagattttaaatccatcaccttatagccatacatattcacagttttataaaacatctattgacaaaattaactttgtgcagagaaaaaagcatttgatctggatgtctaggaattcatgagagtatacccttaatgaattaagaactaattaatgcatttgctttcctgacacttttatttataattttaaaacatagaaaaaattcagaagattgatacaataaacactcatatatcatccatagagatggaacaatattattatagtggcaccctagaaaacatctctctctatatacacagatttacacatacaaaacattggtagtcagtggcagatatcatggcacttccatcttttttttttttttgcagcagagtttcgctcttgttgcccaggctggagtgcaatggcccgatctcagctcactgcaacctccgcctcccgggttcaagcgattctcctgcctcagcctcctgagtagctgggattacaggcgtgtgccaccacacctggctaattttgtatttttagtagagacagggtttctccatgttcgtcaggctggtgtcaaactcctgacctcaggtgatccacccacctcggcctccccaagtgctgggattacaggtgtgagccaccgtgcccggccagcacttctgtcttaaataattcttcaacaaattctaagaataagaatgttctttatataaccatgatactattattacacccaaaggaataaataatttcacaataacttttaatatgtaatgcatagtcaaattatcccgcttgactccaaaatatcttttatactatatatttgaactagagtttccaccaaaactgatattgaatttgattgtttttctggttttgtgtcttaatctagagtagctactggccacttttttcatgataatgactttagaagagtctaggtcaattttcttgttgaatgtctcatgttctggatttgccagtttgtttcctcatcatgtcacttaacttcttctgtccctcatatttcatgtagattgaaggttagatctagaagaacggggccaccaaactttttctataaagagtcagatagtaattttttttttttttttggttttgtggccttatagtctctgttacaacaactcaactctgacattgtaggttgaaagcagctgtcaataatacatcagtgaataagtgtagccatgttccaataaaaccatatttgtaaaaacaagcagcagggtgaatttggtctgcatgttgtagtttgccaaccttcagtctaaagactagattagattaagattaggctgatttgtcaataattctttatttgccacaaacatgattttgtaacttcatgtcttatcaggagatatataatgtcaggttgcccctgtattgataatgttaagcctgagactgagttcagatagtgactatcagatctccacattgtaaatgtacactttggcacttgtaattaatcagtaatttgtgagatgattctttggcactgtagggataccctgttctccaatatgcaacatttttagtggtcatttactggatattgaaaaatcatgattttctaattctatcatatcttctacatttattggctggtattttatgtatcactatgaactcatggatattttttatttaataggttataataatttaaagtcattttccttgatgttccaatcggtatgaatttggtcagtgggagcccagagggaatattattttaggtggaactgctctggatttaggtatcatgccgaggatgaaataacgttatctataaatacattttacaaaatgtgcagtagaaatatatgcctacttccatagctcagtttataaaatggaagagtgaagagattctatttacaaagttctgattttactctagccaggaaacattaaaaaattatctgtaagctctgtaaaggcaggaattgaatctttattgatctgtgtgctgcacttggtgagtaataaaaatatatttgttgaatgaattaaattagtgactctttagaaaaggagagtgaagaacatggggcatgcaggtagggagctcaggtgacctggttttcctgtaactgagatgtttttctgggattggggctttttgtactaaaccaggaaagtgctgggcaattgagatcagttgtttgctttacatgaaggtcctggactgaacaataatttcctctcttatgctattttaagaaagtctgttaaggctggttttcctggttatatattttcaacttgaggaagatctttttagaaaaggaggttgaagcagaggacttaatccaaagtatgtgtgaaattgggccatagcaccttacctgcaatgggagttagctgagcatgctctacggatcagaacacctaaattctacagcaaatgagtgtcaaacatttcctggaaattttcttttataatggtgccatgaaaagttatttgtaacaaacatgaaaaagcatttttaagatactcctggctcagtgaatgacagttcaatattgtcctcattttccaggagacaggatcatctggtttagctgctcattataattatcctgtgaaagaagatgtacaaatactactgtataaagaagtacaaggcttgtacattgaaaattatgaaacattgttggaagaagttaaagatctaaagaaatggaaagacatcccatgttcatgaattgggaggcttagtattcataagatagaagtactccccaacatgatgaatttaacatagtccctaccacaagcccagttaacttttttgcgtaaattgacaggatgaccctaaaatttatgtggaatggtagaggattcacaatagtcaaagaatcttggaaaagaagaaccaacttgaagactcacatttcctgattttaaaacttactacaaagctacagtaatcaagacagtgtggtatgggcataaggattagacatatagcccgatgaaatagaatcaagagtacagaaataaactcttacatttatggtctatagattttcaacaaggatgtgaagacaattcactggggagaaagaatggtctatttaagaaatgtttctgggacaactgtatttcagcatgcaaaagaatgaagttaagcttctgcttggggcctggaagggtgatgtggctgtggcatcgccggcctcgctatgtctgccattttcaatattcagagtctattgactgtaatcttgctgcttatatgtacctgtgcttatattcgatccttggcacccagcctcctggacagaaataaaactggattgttgggtatattttggaagtgtgccagaattggtgaacggaagagtccttatgttgaagtatgctgtatagtaatggccttcagcatcctcttcatacagtagctggggaaaatgccagaatttaattgccatcagatttcattgtgaacaaggacttactgcagaaaataatggaaaggatgtttaactcttttatctccgaacattgaatgagataaatttccagatgctgttctctattttaatgttattggaccaatattctgtataaataattaagatgtaaccatttaatagtctgtaacaatgaacctcagtactgtcactacaatattacattctgcaaatgttattctgttgtatcagatacgaaattttagtgaggtatctctaaggcatatagtagaaaacaaaattggttaattaagttcgtttcactgtgatttggaaatgatttaatctttatagaatgagacccttttttggactagctttttttattaaaatggctcaatatgtgtaaaaaaaaaaaaaaaagaatgaagttaagcccctacctcacactgcattaaataaccaactccacatggatcataggcctaaaagtaagagctaaaactgtaaaacttgtagaaaaaaaaccagaagtaaatctttttgaccttggtttaggcagtggatttttagatatggtatccaaagcacaaatgacaaaatacaaaattagataaataggactgcatcaaaattaaaaatgtttatgcatcaaaatcatctggcaagagacttatatccagaacatacatagaacttttacaacttaacaataaaattcaaataacccaattaaaaatgggcaaataatttgaatagatatttccccaaagaagatatgcaaatggtcaatatacatttgtaaagagtcttatcataagtcattagggaatgcaaattaaaaccacaccgagttaccactccacatctgttggaatggctaaaataaaacaaaagacaagcaattaacaagttttgatgagaatatggggaaattggaacactcctacattgttggtggagatgaaaatggtgcagtcactaagaaaaatattttggcagttcctcaatatgttaaacatagcattaccatacaacccagtaattctactccgaggcatatattcaagagaaatggaaacatatgtctacacaaaaatttgtacacaaggctgggcatggtggctcacgcctgtaatcccagcactttgggaggctgaggcgggcctaccacctgaggccaggagttcgagaccaacctggccaacatagtgaaacccgtcttactaaaaatacaaaaaaattagccaggtgtggtggtgggtgcctgtaatcccagctactagggaggctgagtcaggagaattgcttgaacctgagaggtggaggttgcagtgagccaagaaggcgccattgcactccagcctgggcaacgagtgaaactctgtctcaaaaaaaaaaaaaaattgtacacaagcgtttataagaatattcataatagtccaaaagtggaaaaactgaagtgtctctcatattgatgagtggatatcaaaatatagtctatctatacaatggagtactatttggcaaaatagataatgaaataccaatacatgctacaacatggatgaaccttgaaagcattaagctaagtgaaagaagccactcacaaagtcaaaatagtgtatgattccatttatatacaatcgagagagagagagagacagagagagagagaaagaagttaagtacaactcaagggattctgacttgagatgctggaataatggagttttgccatgtacatagatgggaagattgtgagtggagaaggctgggagtaattaggattaagattttgggcatgtcaggtttgaaatgtgtgttaagcttccaagtggagttgtctaagaggcagttgggtctatgaatctggagtcatcttgtctgaagatacgcattttggattctttagcctccatatatgatcttaagtctatgagacagcatgacattaactagagagacacatggtgagagacagatagggaaaagtgaggacaggtagggaaaagaagaggctagaagacgaaatcatggaatgttgcagcactgagaacttgagaagatgaggaggagccaatctgggtttcagctttaacaccaaccaactggtacctgtttatatccctggtgatctactagtagccacatctgatggtcactcatttaattatcctgacatttcacttcccaacatttcttccatgaaactcttctactcttttgacaattctcccactctctcagccccgcccaccccctaacgctgaccttttctatttatccaactttactaattaatgtttaatatgtgtcttgtggcttacaacacagacacatgcacattggcctggggctgcagattattcaaggaagcatgctcagtgctcatcagtaaatgcctggagtgttgggtgcattcttgtgtctcacaatttagaagcagcagtgatagaactgagtgaatatagaatgtcagtggaagaggagttgttgacaaaggaactcattccaccttctaaggagtatagaaaactcgtaagggtgaagacaggaataaaccttttgtctaagaaatgactagtggtttcatggaagagtgttgaaaattgatcgattccttcaaaataactaatcatagacgttatagggaaggcaattttgactcagatttttcaatctctaatgctgggagctgtccaacaatagagttgattgcaccattgtaactgcccaatgggttcaccttgcctgctgcctagacagagctgctttatcaagacaggagaattgcaatagagtttaaattcatgtagagccagctgtacaggagaccgcagttttattattactcaaattagtctccctgaaaatctggggattggggttttaaagaataatttggtgggtaggagttgggaagtggggagtgctgattgattgggttagagatgaaatcataggaagtcaaagctgtccttttgtgctgagtcagttcctgggaggggccacaagaccagatgagttaatcagtctgggtggtgccagctgagcaatggagtacagggtctgcaaagtagctcaagcaccaatcttaggttttacaatagtgatgttgtccccagaagcaatttggggaggttcagaatcttgcagtctccagctgcgtgactttcttttttcttttctttttttttttttttttttttgagacagagtctcgctctgtcgcccaggctggaatgtagtggcacaatctcggctcactgcaagctctgcctccctggttcacgccattctcctgcctcggcctccagagtagctgggacaacaggtgcccaccaccacgcccgtctaatttttttgtatttttagtagagacggggtttcaccatgtcagccaggatggtctcgatctcctcaccttgtgatccacccgcctcggcctcccaaagtgctcaggttacaggcgtgagccaccgcgcccggccaactgcgtgacttttaaaccatagtttctgatcttgtggctaatatgttagtcctacgaaggcagtctagtctcccagcaggaagggaattggttttgggaaagggctgttaccgtctttgtttcaaagttaaactataaactaagtttctcccaaagttagagcccaggaatgagcaaggacagcttggaggttagaggcaagatggagttagttaggtcagaccactttcaccgtcataatgttctcagcgatgattttttgcaaaggcagtttcagcatcactctcctcaattagaaatggaaggaccaggccggttgcagtggctcacgcctgtaatcctagcactttgggaggctgaggcaggcagatcacaaggtcaagtgatcaagaccatcctggccaacatggtgaaactctgtctctactaaaaatacaaaaatcagctgggcgtggtggcacgtgcgtatagtcccagctactcaggaggttgaggcaggagaatcacttgaatccgggaggtggaggttgcggtgagctgagatcgtgccactgcactccccactccagcttggcaacagagtgagactccatctcaaaaaaaaaaaaaaaaaaaaagacaaagaaatggaaggaccgtttccactaattgagtgagttacatgaaaagttgaccattcattcagtctttcctgttctacatcactcccctggaagacgacggcactgaattagctttaacatgtgcgtgatggtgaataatgacataatcttacaatggcgacttcacataagggtgttactcaaaatctctgtgagacttaactacagagtagctgaaagtttttctagcttcacagctttgttaattctacttattttttcaagatttgcatatactagtttaggtttacctattcaacaagaatttaccacactttccttctatgtcagagattttgctacacagagggggtatgaaggtcccacccatcatgagaattaatatttagattactaggaaaggatcacttattgtttgagttagcattctatgtatagaacaaaacccttctaattacacagtaataagaatgcagttttgcaaagaatttcatgtacattagaaaattttaatggtatgctgagatgcttaaaaaaaatctaacttaggctgggtgctgtggctcatgcttgtaatcccagaacttggggaggctgaagcaggcggatcacgaggtcaggagattgagaccatcatggctaacacagtgaaaccccgtctctactaaaaatacaaaaacaaaatcagctgggtgtggtggcatgtgcctgtggtcccagctattcgggaggttgaggtgggagaatggcatgaactcgggaggcggagcttgcagggagccgagattgcgccactgcactctagcctgggtgagaaagcaagactccatctcaaaaaaaaaaaaaaaaaaaaaaatctaacttagacgagatgaagtgagagcaatgttttaattcaggggtcagcaaaccttcacagtgaaaaaggccagagagtaaatattttaggtaggttttccaggtcagatgatttctgtggcagttactcatatctgctcttgtaacatgaaagcagccacagataatatgtacacaagtgggtgtggctatatgccaataaaattttatttgcaaaaaaacaaaaaaaaacagaaatgggcaatttgggatgctggtcattctttgcatttaaagctagtcttgatgaaactgtcttttatgggttgaattttcattctctacaaattcatatgttgaagtccttaccgccaaaacttcagaatgtggtctcagctattctgacctttgtgaagccaatgtttagttttttcattgcaaatatctgagatgttcacaatagtttgcattgcttatgtgatcatatgttacattaaagccctcagttagaaatagggctgcggtgaatgtaattagttaagctaagatgaggtccatagtggagtagagttggcctctaatctgaatgttgtccatataagaaggggaaatttggacacagacacacctagagggagaacatcacctgaagatgaaagcagagattggggtgatgcttctatattgtcaaggaaagccaaagactgccagcaaccggcagaagctaggggtaaggcatggaacagaatctttctcacagccttcaagtggaaccagccctgccaacaacttgatttcaggcgtcatagtctacagaaatgtgagacaatcaattgctattgtttaactcacccaatttgtggcacattgttacagatgccctagaaagttaatacaccgtcttcaaaaattgtcaaaatcaagatgaagcagcatagttgtctggggtaacacctgaggtttgttgtcccacagccatggaagaagactgggatgcggacacaccagagtgaggttaagagcagaagtttaataggtgagagaaagagaagagctctatgtgcagagaggggtcccagagaaaatgggttgccagttccatggtgaaatgcacagggttttataaactagcttgaggaggtgttgtctgatttacataggccataaaagattggttggatcaggtgtgccatttgcatagcatgtggagaagctggctgccccaccctaatcttttattatacagatgggttctttacctgggcagccccatgttgcctgttcctttgctgtacacatggttgacaaagaaaaggaagagggagcctccatgttgaacatgactggtccccagctagcccttttctattggcgcagcagccggcattcactcatgcaagcttccagcttgcttatctatgtctgcagctcgatttttcaggctgttctttgttagaaaagaaatgattttgagggctgctttttgttaacggggaaaccttgccaaggactctgtggccctccctatctacctaaataatttctttctagctcctgtatcaaagacacgataagatatggtaattccagaactaaaagagaatacattgatgtttggatacattcaagaaccaccaaaagtgcctcccaatggtccaagccttgctacttatgaaagtcctgcagtgatgtcaccattaaaaaatgttgccctactgaggagtctccccagggccctcttcatgtccgtgttcctcaggctgtagatgaaggggttcagcatgggggtgaccatggtgtacatcactgaggccaccagacttgtcctagaagatggtgtggctgcagaactgagatagaccccaaagcccgtgccatagaacaaggtgaccactgagaggtgggaaccacaggtggaaaacgctttgtgctttctcccagctgaggaaatcctcagtatagagaaaacaattttatagtaagagaaaaatattccagtgaaggaaatcacacccaggacgccagttgcaaagtatatcaccacgttattaatgaaggtgtcagaacaggcgagcttcaggacttcaagtagatcacaaaaaaagtgtggaatttccatttcggtgcagaaggacagcctcaaaacagtcaaggtctcgagcagggaacccatgacactgatgcaccaggaccccagaaccagcagtccacagagctgggggttcatgatgaccgtatagtgcagggggtgacagacggccacgaagcggtcataggccatcacggtcaagagtaaattgtccaggcatccaaatgaagtgaaaaaaaaaatctgactgagacagcctgcatatgttatgaatttgttctgtgtcagtatattcagtaacatctttgggacagtcgtggaggtaaaacagaggtcagcaaaagacaggttggagaggaagaagtacatgggggtgtggaggtgggagtctgagcatatggccaggatgatgagcaggttcccggtgaaagtgactaggtacatggagaggaacagcccaaagagaatgaactgaatctctgacgttgctgaaaatcccaggaggagaaattcttgggcatgtgtttgatttcctgtttccatggggataaaataactgccacaagagagaaaaaagcaacagtcaattatcaacacactggcaacatggaaatttggttacatttaattttaagtgaaggaatcaattaacaaaagattgcctttttcttgctgtctttttctggggcatctgaaattcttccatccttttctttgctaccatcgggatctggaaatgtagtgttagttccataatacttgtaccctctatagcctggcttctcaaagtgttgtccatgaaccaacaagatcaacaagagtttctttaaatgcagaatccctggtcagacctacggattcagaatctacattttaacaatatcaccaagggtttcacatgcatattagtgatataggagttaagaaaaaatcacttacgcagatagtaaggttatgggagtcctcagtgaggcttttctttttaatgaaaagcagccccaaatcattttctaacaaagagcatcctgtaaaggcgagctgcagacacaaacaagctgggagcttgcacgggtgaatgccggcaggaactaaggactagaagttttcaagatggtggctccatcttcccttctctttgtcagccacgagcagacaagatggcgcagatcaactggaaagtccaattgcaaagtaagattagggtggggccaccagccttccctgagcactatgaaaatgtcatacctgatggaaccaatctgtgagcctgatgtaaatcagacactgcctcctcaaaggggactattaaactctgcgcattcaccaccagcctgtcctttcctctcggagacccttttctctatggagagaggtgtttctctttttcttctcttctccctattaaacctccgcctctgaactcctcgtgtgtgtccgtgttctaaattttcctagtgcatgccaatgaaccccagggtatatactccagacaatgtagcagcttcattaatatttgagtagcaatggtcttggacacttacagcttctagttctcagctcttctcacctttgttctcctccatgtcttccctcattcctcattacctaatatgcatgcaaaacaggagctcaataactatgctttttccccctgctatctgcatggagttgatacttttcacacattgttctcagctattccaacctttgtttataaagccaatgtttcattttttcagtgcaaacatctgacatgtttacaataatttgcattgtttatgtgatcatatgttacattattttacatgttcgttttgtgagtttctgttctgtcactggaaagccagtcagacattatgctttaaaaaaatattttggtaaaatatggttaaaaaattttataggtactgcgtattaaattaatgcgattttaggatatattttgaattttaggtagagaactccaaagtaccaatacttcacagaaacatagataataccgtggcagctgtcataatcaacttgatcagtgtattagtccattctcacgctgctgtaaagaactacccgagactgggtaatttatgaagaaagtggtttagttgattcacagttctgtatgacttgggaggcctcaggaaacttacaattatggtggaaggggaagaggaagcaagcatcctttttcacatggcagcagagagagagagagcgcgcgctaaggcggtagcaccatacttttaaacaaccagatttcatgagaatcccatcacaagacagcactaggggaatggtgctaaaccattagaaactgcccctgtgatccaatcacctcccaccaggcccctccctcaaccttggggattataattcgagatgagatttgggtggggacacagagccaaaccatatcagtcaggaatctggaaaacagtcaaaggtttagagcaacaaagtgaatccttaattttttaaaaaaggtgactgaaaccaggttggacagctttgtggcaatttatcattttcccaccatctttcttggctcagtggcattgctgaatatgacaaccccacagtcccaccagttcctggtgctgaagatagcggaaatgtatggcaatgttctgttttaatatgtccaatgggccgggcgtggtggctcacgcctgtaatcccagcactttgggagactgaggcgggtggatcacctgaggtcaggagttcgagaccagcctgggcgacatggtgaaaccccgtctctactaataacacaaaaatgagctgggcgtggtggcacacgcctgtaatcccagctacttgggaggctgaggcaggagaatcgcttgaacctgggaggcggaggttgcagtgagccgagattgtaccactgcactccagcctgggtgacaagagtgaaactctgtctccaaataataattaaagaaagataataattccaatggactgctgaaggaataacacaaggagcttacctttacctaccttgaaacctctctcaaaggagattgttgaaaacatttaaagacaaatgaactatccacaagtgtctggggaaaagcatatgagtagtggtaaatgatggacacgctgacatgtcttggaagaaaggctgtggagtgagatatttgggacatatgactttgaaaatttctcacgtattcctgggaatgtagaggtgaagctctgtcgttgtctggggtaaatacccaaggttcctcatctcacgccaaggaaattgagtacgcagacacccaaaaagtgggtttagaagcagaggtttaataggcaaaagaaagagaaaggagaacgtgcctgagtgggacttcctgctggcagcaaagtacactggattttatagactggcttgaggaggcagtgtttgatttaaatagggcccaaagattggttggggccaggcgtcgtggctcacgcctgtaatctcagcactttgggaggctgaggcaggtggatcacctgaggtcaggagttcaagaccagcctggccaacatggtgaaaccccgtctctactaaaaatacaaaaattagctgggtgtggtggtgcgcatctgtaatcccagctacttgggagcctgaggcacaagagtcacttgaaactgggagatggaggttgcagtgagccgagatcacaccactgcactccagcctgggtgatagagggagactatgtctccaaaaaaaaaaaaaaaaaaagaaaagattggttggaccaggtgtgacgtttacatagtccggaggaagctggctgctccatcctaatcttctattatgcagatggggtctttgcgggtcgctgccatgttgtcttctccttactgtacacgtggtttgcaaggaaaagggaagatggagtcaccatgttgaacatgcctggctcccagacagccttttcctatttgtcacagctgccagcattcacccgtgcagggttccagcttgattatctatatctgcagcttgattttacaggctgctttttgttagaaaagaaattatttgggggctgctttttattaaaagggaaaccttaccaaggacttccttaccctccctatctacctaaataataataataataataattttttttttttgagacggagtgtcgctgtgtcgcccaggctggagtgcagtggcgcgatctcggctcacttcaacctctgcctcctgggttcaagtgattctcctgcctcagcctcctgagtagctgggactacaggcgcgtgccacaaagcccagctaattttttgtatttttagtagagacggggtttcaccgtgttagccatgatggtcttgatctcctgatctcgtgatccacctgcctcggcctccgaaagtgctgggattacaggcgtgaaccaccgtgcctggcctaaatatttctttttaactcctatatcagaaagattcctgggaatgtaggatacataggtgtcctacccaggattgcatgctaagtaaacatctagaaggccctgacctctcacctgtagctgatattcaagctctgtgcaagtaggaagttaaggcaaaggctggagttgaaaaatgctcagctgagtggtaaaggcctgtctgaaagcacatacagagccaaactgcaaaggttgggagattttggttttgggctccactgtttaaggaaatctcttatcaaatcactctctggccattaagctaacagcctagagacttcagcaaccacacactggacaaatatgcaatctttataaaattagaagactcattaggcaagtaaacaactgcaaattacaaaaagcagcaaccataaaccccaaggaggagagaaaatttgatttccagagtcgccacactataatattcaaaatatttagttgtaatgaaatattatgagacatgcaatgaaacaagaaagtatagcaaaggaaagaataattaattagtagaacctgaccccaaggaagcctttactgaggctcaatgcctgggcttcttcgtttacatgcaatctcatttacatgaaatagccacaatacataaacgagtcgcaggataacgagtcgcagggactggggagcgggggtaggggatgaggataaagtgctactgtaatgtgtaagtggttttatttaggagtaatggaaatgttttgaaactagatagagatggtggttgcgcaaaacacagaatgtagtgaatggcactcaattgcttgctttcaagtaactggttaatttatgttatattaatttcatctcaataatttttttttgagacaaggtcttgttttgttgcccaggctggagtgcagtggtgcaatcatgactcactgtagccttgacctcctgggctcaagcaatcctcacatgtcagcctccaaagtagctgagactacaagaatgcaccgtcacacccagaagctagtggatctagatagataggaagtttgattgcctattgaattcctattaaattcctctgctatgtatatggcctcaatgtttgaattcacaagcacgggggttagaaggaacatttcttgttcagctttgatcactacgctgcagaatgcccaaagaaggtccccagtctgtactcctcctgcctgcaaaaaaaaatctgagagttcttggggctagagcttcctcacactcaaggggaatgagatgcacattgattcaaggctcattgagaccctggtgccttctgtaatctaggaccatccctggagcatcttcatgtctcccatgatggtccactgaggcaggacccaagaaacaggaaaataattttttttttttttttttttttttttttagacagaatctcactctgtcacccaggctggagtgcagtggtatgatcacagctcactgcaacctccgcctactgggttcaagtgattctcctgcctcagcctcctgagtagctgggataaaaggcatgtgccaccacagccggccttgttttgtatttttagtagagacagagttttgccatgtgcccaggctggtctcgaactcctgacctcaagcgatccacttttctcggcctcccaaagtgctgggattataggcgtgagccaccatgcccggcctgggaaattatttctgtgtgacaaaaaataatctgaatgaccagcttcattgggttttctttttctaccttccacatgtgaccatccattagggatctagtaataacatttttaagtcacaaactttgagagggaccagctatttttattatcccatttatataagactgctatctaaaaattacaacagttctgggacatatactgatatgagtcaatccaaaaatgtaatttggacatcaaagtaagaccagatggtgacttgttaattggagacaccaaattaatgttaataatacagaaaattgtcctctaactatgatggtattatacaataagtctgtactatttagagtctaaatgttcttgtcactcaatgagatgtgctttaactcaagacaaggtttactgctatttttttcagggctcctgaatacctgggcaatacctagtgtccttggctcccctctactgctgtgtggctgttactgtgtgtgaggtctttagcctacattaaggaacatttcaagaatctaaaaatgtgtttttggattccttcaagggaattggctggaaacattgctccttccatcacacaatgtgactgctttaagagaaacagtcattaatgtattttatgccttcatgtcaggaatggccatgttgctaagttttattttaagttccaggatacatgtacaggacatgcagatttgttacacaggtaaatgtgtgccatggtggtttgctgcacctgtcaacccatcacctaggtattcagccctgcatgcattagctatttatcctgatgcgctccctctgccaactcccactgacaggcgtcagtatgtgttgttcccctccctgtgtccatgcattctcattgttcagatcccacttatgagtgagaacatgaggtgtttggttttccattcctgtgttagtttgctgaggatgatggcttccagcttcatccatgtccctgcaaaggacatggtcttgtccctttttatggctgcgtagtattctgtggtgtatatgcacaaaattttgtttatccagtctatcatcgatgggcatttgggttgattccatgtctttgatattgtgaatagtgctgcaataaacatatgtgtggatgtatatttataataggatgaattatattcctttaggtatatacccagtaatgggattgctgggccaaatggtatttctggttctagatccttgaggaattgccacattgtcttccacaatggttgaactaatataggttaccaccaacagtgtaaaaacattcctatttctccacagtcttgccagcatctgttatttcttaactttttaataattgccattctgactggcatgagatggtatctcattgtggttttgatttgcatttctctaatgatcagtgatgttgagctttttttcatgtttgttggccgcataaatgtctccttttgagaagtgtctgttcatgtagggatggccatgcttctattaagcacttttttgttttaatgttatggatcctgctaatcttgtaattgatcattgtgccagagattgcctacccaatatatccattctttttttgttattaatagaactcaattatatttggaagtggtcatgtgtccagctaagatactatattttccactctctattgcaaaatcatggagagttgaagcataggaatttatttgatgggaatcctggaatcctctttagaatccttcccctctgttcatctctttcttgcctgggatttgcacatgacactggaattcccttagctgatatatcttggaaaacaacacattaaagatggggcagcagagagatagagtaaacccttgtgcctcaggttagcacagagtgatcatggtgacccattcttttagggaggagacacattaactcctgattgaattaaaacagtggtggatcacgaggtcaggagactgagaccatcctggctaacacggtgaaaccctgtctctactaaaaatacaaaaattcagctgggcatagtggtgggtgcctgtagtcccagctactcaggaggctgaggaaggagaatggcgtgaacccaggaggcggagcttgcagtgagccgagattgtgccactgcactccagcctgggtgatagagcgagactcagtctcaaaaaaaaaaacaaacaaacagtctttagaagcagtcaacaaacatgaaaaattgctcaaaaatttctctacatcctcaccaacatatttttttatttctttaataataaaccattctgactggtgtaatcatcagataaatgcaaattaaaaccacgatgagataccatcttacaccagtcagaatggttattttaaagaaataaaaaaaaaaaaaacaacaacagatgttggtgaggatgcagagaaaagggactgcttatgtgctgttggtgggaacgcaaattaattcagtctctatggaaaacagtatggagatttcccaaagaactaaaagtaggactaccattcaatccagcaatcccactagtgggtatataccccaaagaaaagaaatcattacacaaaagacacctgaactaatacgtttatcacagcactattcacaatagccaagtcatagaatcaacttaagtgtccaccaatgtatgattggataaataaaatgtggtatatatacagccaacggaatactactcagccataaaaagaatgaattcatgtcttgtgcagcaacatggatggaactggaggccattatcctaagtaaaataacttggaaacagaaaatcaaataccatatgttttcacttataagcagaagccaaacaatgtataccatgggcatagataatggaataatagtaggcattggagactccaaaaagtgggagggtgggagggatgaggtttgagaaattacctattgggtacaatgtacactatttgagtgatggttacactaatagtccagacttcaccactatgcaatgtatctatgtaacacaaacgtacttgcattcattacatctgtaaaataaaagtttttccatttatgtagacacatttcaacctaacagcacagaatgctttgtcctcgttagaactcatagagtcatatcggggcccaatttgggctactatgtaacatttggtgaaatatattttgattacttctgtaattatgcacctcgttgtatgcccccctttttttacttctgttacaatatttcctttgtcatatacatttaagatatttttctttgttttgcatattgagtaggtttcttgaaattcttttggaacatgttatgtaaatgaacaaataaatcaatggtgtgtttcgagtgacactcagccctgaatttgacccattgtatctctactttcaaaagcattctctgagatctccttaaactcactgttgtgctgatgagggattgatccacagaatgtaagaaacatctctggggtcaggttctagagggaaaacgctgaagtaaaactcacacctgcccaactccaagtcagggcctttctcactcacaatgcttcataaatacgaggagatggtaaagttgaaatagagccgaatcctgaggcttgcacatacgtaaaggaaggtcagatccggctgcaggaagagagtggccctggaattgtgccagattgaaagcaagaaacagagattgaaagcaagaagaaacagtaatggagagcaagaaacagattgaaagcaagaagaaacagagattgaaagcaagaagaaacatagattgaaagcaagaagaaacagagattggaagcaagaagaaacagagattgaaagcaagaagaaacagagattgaaagcaagaagaaacagagattggaagcaagaagaaacagagattggaagcaagaacagagagaggaccggctgcaagaatccccttcagagcgagggacacaaactgctcaggactttgaatcaatcctctttcaccatctcatcatttctggctgtttcccagaagacttggttaataaaagcttttcttccctccacaaaactttcccacagtacttacgggtttactctggcttctcttgatatccctcaatggacttggctctgttgaccttccctccttgcacaatcggtgcaggcagggcaagggggtgggtgtcaggggctggttctctggagtggatggacatttcagagaggcatagagaaggtgctcttggtctggggctggtgaactgcaggtgggttctgcaaagggagaatttacagtttatggagaaccggaggctgaattctcagggctcctcattaaataagttgttttattgttgctcaattctccaagcagttcagctccttggaggccaagcaatataaataaaaagtgtttctgccagttcattccccgtgggctcacctttgggactagacacatattcctttctattcgatggttttcatctcccttagaatgaacatccttcccccaacactggaaatgacccctcttccagggcacatctcaggaaccacctcatgaatctccaagtttctgagggacactcggtttccagtgttagacttagacatatggttttgtcccctaaccacattcaaccaaaatgagttttttttttttgttttttgtttttgagatggagtcttgctctgtcgcccaggctggagtgcagtggcgcaatcttggctcactgcaagctccacctcccgggttcacaccattctcctgcctcagcctcccgagtagctgggactacaggcgcccgccaccatgcccggctaattttttttttttttttttatagtggagatagcgtttcaccatgttagtcaggatggtctcaatctcctgacctcatgatccgcccgcctcagcctcccaaagtgctgggattacaggcgtgagccatggcgccaggcccgaaatgagctcttaactgcagctttgtcctggcttctattctggacactggagacagattctggagaaaaattaatgggccatttcccttggtagagagtaaaaaaggctcattttggctgcagagttagcgttttcttgtctcagtttctctgagttcagttattcggtttcttcatctgggctaaacacattcatatttttaatccacatgatctaattttttgggctatatttctatgtatgttatttggagcatttcttcccaatgggaaggaatttggataaaaaataatcagcacctgacagtgactaagagcatgcactggcaaacatttttgtaaagggctcagtggtacatattttaggctttttgggtcctatgttctctgtcacaatacttaactctgccattgctgtgaatgcaggtgtatgcaatactgacactaatgggcatggctgtttgtattagcctcctgtggctgctgtcacatgtaaccacaaactgggtggctgaaaacaacaggaatgtattctcttatagttctggagtccagaagtccaaaatcaaggtgcaagaagggccaggcttcctccagagtctctaacggtgattctgttcctcggcttttccatgctctatggctccaggtgttcctgaccttgcagctgcgtcatttcaatctcctctgtctgtgtcatttggtttcctctgcacctgtgtgtgttttctcctgtgcatgtcgcttataaagacactgtgtcattgaatttaaggtccacctggataatccaggatgatctcatctcaggatgcctaattgtatctgtaaagactcttcatccaaataaggctacattcactggcactaggggtgaggatgtgagcttatcctttaggggggccaacattcaactcaccaaacttactgtgctcaaataaagcctttttacaaagaggctgtgggtaggatttggcctgtgggcagtagtttgctgacccccagcttagagggtagattcagatacagggagctgataatcacagaggacactaaaatttaaagaaaagttaaatatggcttcatttctgctactgtaattcacctattaaaaggactgtcagactatccaccatactctaatcttttattatgcaagctgtaaatacagatgaagcttcacttgctcacctgctgctcacctcctcccgtgcggcctagctcctaacaggctgtggaccagtactggtctgtggcccaggggttggggacccctgcactaagttatttactactgtggacctatggggtgtaggtgctttttattgagcttcctggtgtgtgttgttcagtctttgctgcagtgactggggcagctctgcttcatgctgtggacaggctgggatggttctactccatatgtcttgtcagtggattagcaagggcatgctcttattgaaatagcagagactttactgctcagcagaaatatgcaaggtctcttaggggctacacttagagctggcatgctttctataatctcttccattgagggaagagagagaccctctcatattgttttatattgttttatactcagtacctgttttaagaaaaaacaaagaagtgaaatcaaagacaggcagcccggtgccaggcccaaaaccaggcctgggcctgcctggcctaaacatagtagttaaaaatcaactcatgacttagaaaccgatgttatccatagattccagacattgtataaaagaacattttgaaactccctgctctgttctgttccactctggccaccagtgcatgcatcccctgtcacgtaccccctgcttgctcaaatcaatcatgaccctttcatgtgaaatccttagagttgtgagcccttaaaagggacaggaatttctcactcggggagcatggattttaagacgctagcctgccgatgctcccagctgattaaagccactcccttcactatctcggtgtctgaggggttttgtttgcggctcgtcctgctacaccataatatagaattagagggaacacttcctaactcattttatgaggcaaaagttatcctggtgatggctgggcatggtggctcatacctgtaatcccagcactttgggaggccgaggcgggtggatcacttgaggtcaggagttcaagaccggccttgccagcatggtgaaaccccatctctactaaatatacaaaaaattagccaggcaaagtggtgcacgcctgtagtcccagctacttgggaggctgaggcaggagaatcacttaaacctgggaggcggaggttgcagtgagccaaggttgcaccactgcactccagcactccagcttgggcgacacagcaagattccatctcaaaaaaaaaaaaaaaaattatccgagtgtccaaaccagaaaacatttacaagaaaggaaatcttcaaaccaatataccatatgaacacagatgcagaaattctcaacaaaattacaaaattaacaaattaaatccaaaatatacaaaaataattatacactgtattagtccattttcatactgctataaagataccaccctgccaggcgcagtggctcacacctgtaatcccagcactttgggaggctgaggtgggcggatcacaaggtcaggagattgagaccatcctgatctaactcggtgaaaccctgtctctactaaaaatacaaaaaattagccaggcatggtggcgggcgcctgtagtcccagctactcgggaggctgaggcaggagaatggcatgaacccaggaggtggagcttgcagtgagccaagattgtgccactgcactccagccccagcgacagagtgagactccgtatcaaaaaaaagatactacccgatactgggtaatttataaacaaaaaaggtttaattgcctcacaggtccttatgactggggaggcctcaggaaacttacagtaatggaggggaagcaagacacgtcttcacaaggcagcaggaaagagaggcagagagagagaaggggggcgtgccagacacttatcaaacagccagatcttgtgaaaactcactcactatcacaagcacagcaagggggaaatctgcccccatgacccaatcacctcccaccaggccccttccttgacacatggggattacaatttgagatgagatttgggtagggacactgagccataccatattgtacaccatgaccaacaggacttaggttaggtcagtctctttaataaatgccattgggaaaacttgatatccacatgtgtaagaatgaaattggatcctatttcacaccatatacaaaattcactcaaaatggattaaagacttaaacattagacctgaaactatagagctactagatgaaaacatagtggaaagactgcatgacattggtctgggcaataatttttgggaaatgaccccagaagcacaggcgacaaaaggagacaaaatgtaaaatgagattacatcaaactaaaaacttctgaatggcaaagaaaagcaatgagcagagtgaaaagacaacctatgggttggcaggaaacattcacaaaccatccatctgataagggattcatatccaaaatatataaggaacccaaacagctcaatagcaataaaacatatatcctgatattaaaaaatggacaaagaacctggatagatatacaaaatggccaacaggaatatggaaaatgctcctttatttatgtattttttttttgagacagagtttcattcttgttgcccaggctggagtgcaatggtgcgatctcggctcactgcaacctccacctcccgggttcaagagattctcctgcctcagtctcctgagtagctgggattaaaggcacccaccaccatgcccagctaatttttgtatttttagtagagacgggggtttcaccatgctggccaggctggtctcgaactcctgacctcaggtgatccacctgcctcggcctcccaaagtgctgggattacaggcgtaagccaccatgcctggccgggaaaatgctccttaactgaacggacctcctcttggccaaaggaatcccagaaaaacttttaaaacttcacttccagccatgacgggacgagaggtcaaacacacctcgttataccccttccttttcatggttcactacacaacaaccaaccagcattaataaaatagagaccatgagactggcagaacagacttcttgcggcaataagatacccaattataagcagggcctaacgccatgcccggcaagcattaagtcacacaccctacccttaaagaataatttatgttctacctgccaaatggtttttatttttctctagcagctaaacaagctctggactcagggtaagcaatattaaaacaatttgcagctccaccagatactaactgacccccagcccctattccagcagccataactacagctttgattgggcaagagactgattgggcaactttctcctgataagaccactgactgtggactggctctggctcgtctacagaggctgctcacttgcgtgcttttctgttctgaaaagaacttttgagggatagggtctacttgtaatacatttaaatgttaaagtctccactccaaagtgggcatgggttgtatgttgcatgagtgtttgtttcatacacatgcaccagggccagcttcatgaatattcatatctcctcctataacctgttgaatatgtatgtctagccaacccattgagcataaagctcttagctcttaccccaacccctcctccttagaaatgcctgtctctctggtattggctagaggctatgcttcccactctgtgggattgccatcttgcaggctgtaaccctttacaagaaataaagtctcctttccttttctaaatttataaattgtggggggtttaaaagttaacatagccacataaacatgtttcccttagtttagaagggaaaaacaattttctggagatatcaagggctgtgtccccaccgcaagtcaatgctttttgatgatcctaaggacctaatcaagagagtttccttgagtctctgagtttgtgcgtgtgtgtgtgtgtgtgtgtgtgtgtgtgtgtctgtgtctgggtgtgtgtgtgttgagacaaggtcttgctctgttgcccaggcaggcgtacagtggtgcaatcatggctcactgcagcctctacctccccagctcaaacgatcctcccacctcaacctcccaggtagctgggactacaggaacatgccaccatgcccagttaattttgaaaaaatgttttgtagagatggggtcttgctatgttgcccaggctggtcttgaactcctgggcttaagtaatccaccccacttggcctcccaaaatgttgggattacagacatgagccgccatgttctgctgagtctctgactttagaggaaactttcagtgaaaggagcgtaccccataagtgtatatatctactatatacccacaaaaattcttttaaaaagttaaagaaaggagtgataaggtgtgtgatggttaatactgagtgtcaacttgattaaactgaaggatgcaaagtattgatcctgggtgtgtctgtgagggtgttgccaaaaaagattaacatttgagtcagtgaactgaaggaggcagacccaccctcaatccgtgtgggcaccatctaatcagctgccagtgtggctagaatagagcaggcagaagaaattggaaggagccgacttgctgagtcttccagctttcgtctttctcccatggtgaatgcttcctgccctcgaacatcagacctcaagttcttcagcttttggactcttggacttacagcagtggtttaccagaggttcttgggccttcagccgcagactgaaggctgcactattggcttccctaattttgaggttgtgggactcagattgtcttcctttctgctcagcttgaagacgatctattgtgggacttcaccttgcgataatgtgagtcaatactccttaataaactccacttcatatatatatctatcctattagttctgtccctctagagaagcctgactaatagaaggtgctaggaggttagatatctggaaggcaggtgagttattggagaaggagtaaaaattaatcaaataaataaataattgggttcacctaatgtctaacatggtctcttgggaacagagaatgagcaggaaaaatttccttactgtccagacaggagtccacagagaaatcagacacttacgggttagtaagttccagcagtaagaggggaggtgcctaatgagcagatacagggagctgtggccctcagagaatacaatagagaaaaaaaatgtctaacaaacccactaatagattaaccctcacaaggaaataattgcaaagtaaagcttgctatcataccccaaaagtaggctagctaatctgagtcccagactggggactgggctgaatgggacccttcagcccattccaggtgggaatggaagttcaattgttaagactctgcacaggacatgatctcattcctttttatggctgcatagtattccatggtgtatatgtaccacgttttcttcaaccagtctgttgttgatgggcatttaggtcgagtccatgttttcactccaattaatggatctactttaaaaaatagtggtcatcttttgccgctatgtagaacataaatctggctagaggacctatgcctcactctttcctgctgtctcgtctggggacagagcttcatcctctatcatcaaccattcagggtaaaattcagacttccatctggagatcctcttctctgagaccccatccaggtgagcccaggagccctcagcaggtttcatgggaaaggttcagagagaacggaagctgggaatgtttacctgaagtcacctgagagccaatccaacttaggccagcgccaagaggttgctatgtttgtttgcttagttgactgattatttcataatcaatctatttagtatgctaaaaagagcagtgtctgttagactcagcaatgcagagaccactgctgacaattaagtggtgggaatggaattccaattggtaagactgaagaaggaatgggagctaaaaagtggtgctggtaacatcagttcatagtcaaggagttttgcaggtaagagagaaaaaaaactgagtattaagtgtaaaggatatgcagcaaagtgagggcttttaaaatatttttaatattgggtgtattttgagtatgttcctgtatccattaaaaagatcacaccaatgtattatttgcaaatgctaccttgccacagcagttaataagtcatacattttatttattttatttatttatttatttatttatttatttatttatttatttttgagacggagtctcgctctgtcccctagactggagcgcagtagtggcacgatctcggctcactgcaagctccgcctcccaggttcacggcgttctcttgcctcagcctcccgagtagctgcgactacagttgcccgccactacgcccggctaatttttttgaattttttagtagagatggggtttcaccgtgtaacccaggatggtctcgatctcctgacctcgtgatccgcccgtctctgcctcccaaagtgctgggattacaggcgtgagccaccgcgcccggctgataagtcatacattttaaagtatcttttctcatgcgggttatccagatgaaaaaaatatgtttatttaataagtgaaaaggggtatgatagcaagctttactttgcaattacttccttacttgtgaggcttaatcgattagtgggtttgttagatagttcctgtttctattgcaaacagtctttgcgagatctttgcttttgtatagcgagtttgcagtgttttcattcctgtatttgattgcatttttttcaaacataagaatgggagttggtgaacgttttttcaccaacgttgttgtttgccatttagttctttttgtatttatagatgcgcttggggtgaatgcgttaaagtttatcagttttgtgcggtcaggtctatcagtgggtcacactgtgtatctcccttctgttgcattttagatagtttagagagtttaaaaagctttctacatatttcatcgcaataaatcaccttttatatgtatttccaccttatttcacacatttttttctttcttttttattatactttaagttttagggtacatgtgcacaacacgcaggttggttacatatgtacacatgtgccatgttggcgtgctgcacctattaactcgtcatttagcattaggtatatctcccccctccccctgccccataacagtccccggtgtgtgatattccccttcctgtgtccacatcttttttctttattgccacctttcttttttcttttttgcaatcagatctattttttttaaatttaaaattttattttaatttcgggggtacatgtgcaggatatgcaggtttgttacataggtaaacatgtgccatggtggtttgctgcacccatcaacccatcacctaggtattaagcccagcatgcattagctattttttttaatgctctccttcccctcacccccaccccctgacaggctccagtgtgtgtcgttcccctccctgtgtccccgtgttctcactcttcagctcccagttataagtgggaacatgtggtatttggttttctgttcctgggtcagtttgctgaggataatggctttcagctccagccacatccctgcaaaggacatgatcttattcctttatatggctgcatagtattccagggtgtatatgtactacattttctttaaccagtctattgttgatgggcatttaggttgattccacgtttccaattaatcagaactacttttaaaaatagtggttatcttttgccactatgtggaacatattcttatacccacgttgagatttcctgtgtattcttcatgtaagcatattttaatccatttcagtttgtataagatgaaatcataactttacatactgttgttttcttccactgctttaagaaagtatatttttatattctttcatttccaagtttttgtcaacttaatctcaaattcgaaacccatgttgatgtgattaatggttattttctatctttttctttgatcatttattttatttttatgcgtttatttatttatttagagatacagtctcgctctgtcacccagcctggagtgcagtggcacaatttcagctcactgcagcctcaacctcttgggttcaagtgattcttgtgcctcagcctcccgagtagctgggattacaggcatgcgccgccactctgcccagctaattttttgtatttgtagtagagacagggttttaccatggcagtcaggctggtctcaaactcctggcctcaggttgatctgcccaccttggcctcccaaagtgctgggattacaggcatgagccactgcgccgggatagatcatttattttagaattttattcagttttgttcaatgtggttgttttgaatccaccttatttaaccaagctttattttcccagccattccttttgtttaataagttcttaatttaaaaaaatgtgtttctcaatgaaaatacatggacatggggaggggaacatcacacatgggggcctgttggggggtcgggggcaaggggagggagatcattaggacaaatacctaatgcatgaggggcttaaaacctagatgacgggttgacaggtgcagcaaaccaccatggcacatgtatagctatgtaacaaacctgcacgttctgcacatgtatcccagaccttaaagaaaaaaaatcacacaggaaaaaaaaaagtgttcctatgtagacgtacaactttttgtgaaaccacaacagtgaagaaagcaggtgaaatccctgctaatttagatcttaccttgtaatggaaagggcagaaaacaatggaataaatgtgtgtctgacataaagtccccagaggtaagtcatatgaagaaaaatgatagattgtcgtggcaggggcaggattttctaaagtatggtctggggaggtctttgcatcttgcacgaggaacggaattggactagagagtgcccactggatttgtcagaaaagagggaaaaactcaatacctgggaattacaaagaacagatcccacaaggaaaagtgagagaaaggcctgcctcatctactactggaccatataaaaacatgtgtgggccgggcatggtggctcacacctgtaatcccagcactttgggaggctgaggtgggtggatcacgagacctgcctggccaacatggtgaaaccctgtctctactaaaaatacaaaaattagctgggtgtagtggcaggtgcctgtaatcccagctacttgggaggctgaggcaggagaatcgtttgaacctgggaggtggaggttgctgtgagctgagatcgcgccattgcactccagcctgggtgacaagagtgaaactctgtctcaaagcaaaaataaaaacaaaaacaaaacatgtgtggtccataaatatggaatagatacaggaataacaattagatcaggggtctgatgtgaattctgtaatgaggcaagtggatcaatgaaattctgctcagggtatgggccctggagtccggagataatgtcagttctacgctggctacctgttctcccaacagtgtggctcttctcttgagctcttcattcaggctgcatttcccaggaacttgccttaaaaacaaaaaacaaaaaacaaaacaaaactattccgcctttactgcagtggattccacactctttgtgtctgaaagtaagaaataccttttacatcatgagccagcatgcctgcacatgcaaatatacacacacaggtggctgaagaaagagtatcatgaaactagtttgtaggtacccttatcatatatgatgtgcttgaatattttcttctgcattttattcattctatgctatttaaatcttacgtaccatagcacaacccctcaatcagtcccaatctcagaatatggacaacattctcctagtgtgtcctccacacctgtgttagcatctccctgtatcttttatttcctcatcagcaattgctgggacaacacaaaatgtccctcaccattgtcaccattcttctttctacttctatgagttcattatcattttaagattccccatgtacgagtgtgcagaatttgtttcactgtgcctggcttatcatttaatgtaatgtcctccaggttcatccgtgtggtcacaaatgacaggatttccttctttttaaaggctgagtggtgttctattgtggatatgcaccacgtattcttgatctattcattctttggcggacactgaggttgactccatatgttggcttttgtaaatagtgttgcaacgaatgcggaagtgcagatatctcttcaacatactgatttcatttcctttggctatatatgcagtcatgggattatacacatatggtagttctatttttagttttttggagaacccccaactattttctataatgcttgtactaccttaagtttccaccaaaaaggtacatgggctcccttttctccagatcctcatcagcacttatctcctgtctttttttttttttttttttttttttttttgagatggagtctcgctctgtcgcccaggctagagtgcagtggtgcgatctcagctcactgcaacctccaccacccaagttcaagcaattctcctgcctcagcctcctgagtagctggcattacaggtgcccgccactgcgccggctaatttttgtatttttagtagagatggggtttcaccgtcttggccaggctggtcttcaactcttgacctcgtgatccacccgcctcagcctcccaaagtgctgggattacaggcatgagccaccgcacccagccacctgccttttttataatagccgtcctaacaggtttgaggtgacatctcattgtggttataatgtacatttctctgataatcagtgatgttgagcattttttcatgtacctgttggccagctgtatgtcttctattgagacatgtctcttcatgtcctctgcctatttttttttttttaaactgggttacttgtttccttgatgttgagtttcttctatattgggatattaaccccttatcatatgtgtggtttgcaaatgttttctctccttccataggttgcctctctgttgattgttttctttgctgtgcagaaggtttttaatttgatgtaatcccacttgtctattttcactttcgttgcctgtgttttgaggggtatattttaaaaccattgcccagactactgctttctgcctatattttattctggaaggtttatagcttcaggtgttatccttaaatgtttttaaaaatttgcgtaaattggttgggtgcagtggttcatgcctgtaatcccagcactttgggaggctgagacggtcagatcacttgaggtctagagttcgagaccagcctggcaaacatggcgaaaccccatctctactaaaaataaaaaattaggtgggcgtggtggcatgtgcctgtaatcccagctactcgggaggctgaggcaaaaggattgcttgaacttgggaggtggaggttgtggtgagccaaggttgtgccactgcactccagtctgggcgacagagcaagactccgtctaaaaaaataaaaaataaataaaatttgtgtaaatttaaggggtgtaagtgcagttttgttacatgggtattttgcctagtggtgaagtctgggcttttagtgtaaccatcacccaaatagtgtacattgtacccattaagtaatttatcagtcctaaccccctctcatcttcccacccttctgggtctccaatgtctattattccacattctatatttatgtgtccacattatttagctcccacttgtaagtgagaacatgcagtatttgactatttctgagttatttcacttaagataatggcctctagtttcatccgtgtttgagtctttaacctattttcatttaatttttgtatatggtgtgaaatgagggtctaatttcattcttctgcatatggatatccagttttcccagcaccgtttattgaagagatggtactctcactattgtgctttttttttttttggcaatttgtcaaaaataaaaattggctgtaaattcatggatttatttctgggctctgtattcttttccattggtcaatgtgccccaatacagtgtgctttccatttaccttttcccctctgattcacatgaataataaaacaaagtccccagattttctagataataagtgtatccatacatggagctccctaacttttatggctttcacccaagggacaggatcctaaattatttagctctgggagttgatggggctctgcattcatgaatcccttgaaaccaaagagaacaaagaggtaactttctttttcaacttttattttagaatcatggggtatatgtgtaggtttgttacaaagatatattgtgtgacactaaagtttggggtatggctgaacccatcacccaggtagtgagtacccaagaggtagtttttcagcccttttcctactccctttctccccactatagtagtctccagtgtctgttgatcccaactttatgtccgtgtgtacccaatgtttagctcgcacttataagcgagaacatgaagtatttggttttctgtttctgcattagttcacttaggataatggccttgagttctctccatgtagctacaaaggacatgtttttttcttttttatggctgcatagtattccctggtgtgtacatactacattttctttatccaatacaccattgatgagcacctgcaatgattccatgtctttgctattgtgaatagcaccacagtgaacatatgggtgaatgagtccttttggcaggatgatttattttcctttggctatatactcaataatgggatttctgggtcaaatggtagttcaactcagttttttgagaaatctccaaaccgcttcccacagtggctggactaatttacattcccaccaacagtgtataagtggatattatgctcatgaaataagccagagagaggaataaaaaatgctacattatttcacttatatgtggaatctaaacaatgtcaaatactgaccaggtgtggtggtggttcatgcctgtaatcccagcattttgggaggtcaagatgggatcaccatttgaactcaggaatttgagaccatcctgggcaacagagcaagatgtcatctctactaaaaatatgaacaagtgagccaggcatggtggtgtgagcctgtggttccagctactcaggaggctgaggcaagaggatggcttcagcctgggagatcgaggcttcagtgagctaccatcacaccactctacttcagtctgggtgacagattgagatcttgtgcttaaaatgtaaaatacatagaaatagagagtacaattctggttatggaggggtgagaatgggaggagtggggaatgggaaaatgtgggtcaaaacgtacagagttgtggttatgtaggatgaataagcctagacatctaatgtacactatgacgactatagttaaaaatattatactgtacactgtgaattttctaagagtagagtttaggtgctctttccaccaaaaaaggtaactatttgaggcgatggactcaggatcttttcatttgctttagccaaaagaatatggtggaattgagtgtccctcaagggaacttggcatgtttctgttgctctctcctgtaactctgcctctgccatgcaaacaagtccaggccagccagctttaggaggagaggacatgtaaagccatgttaagacagttggcaagctgtcccaactgtggccaccctaggtcagcccacagccaacaagcctccaaatgtaagagaactcgggcaagatcagcaaagccctactgttgactcacagctgactacagcttcatgaggaggacagcagagaccagaagacacccccaacgtagactccctatgagacaagaaaagcatcatcttaaaccatttactatgagatgacttgttattcagcaatagcttactgatacaataagcattgcaaataggactgaggacattcagaatagtctgctgcttcttattttggcatttgttctaatacttggaagcattcatgattccctggatactcatgtataattcagataactgtattaaaaaaaagactactgttgagattccccatctaggtgatctggagaggttagaatgagatgtatgttttttgcaggaataatttgtgcacctgaatcacaattttccattcccagagacataacgggataagttaaaggtttggtgtgagtcacccttttcacctgaatcacaattccccattcccagaggcatgactggggagaagctcaaggttttgtgtgagtcattctttaatcatgagtatttaagagaatttagagcataaaagagatgaataaattgatgatacattgaatattgttcactgacctgcactttaatgtttacgacaaaattttataatgaaggaggtattttggttagtgggatagaaggattcgtatttgtagggagcactaaaaattttgaagcaaaaacagaagtatggatgcatgaaacattatagaccatggcaccaaatccatcactccaataaataaacttatatatgggcactaagcttccatacttcaatgagtccatgcacatcataaaaacaagtcttccatagcaattcaatgtatgattgacaattttactccatcatatttaaggtcatctctgactgtaagtccatattaagttaatcaacatatgcaagtttgtctttcagtgggcattgcactcggaacatatttttgataaacaatttttgccttaccgtactatgccagggagtatggcagatactgtggacatggcactgacaaagacatgatgtcctaatgaggacaacacaatctcatgaccagctgcaaaatacacaagtatgttcaggtctacattatcaggaggagcattgaaggtagagacagacataggactgaagaatacaaaagtgaacaaattgtggtctcaggtcatattccactataaatttacatcaattaccccaattgccaagtgtagtctatgccacaggagacatacaactcttccctgtatgagacaaatggaaatctccaaagtgtttctgatccaaagtcggaaataaccttgagaaagtaggaaaacaacaaagagaaaaaactgttggatatcagagagcagaaagcttaataaaaggagttgcttaaattctacaagaccagttgaaatcacaacaaattgaaactcccagaaatataataagtattaatagaaggagcaagttctatttccactatctgattgaagaatgacagttactacctctgaagcttagagccctgcaatcatgggcacttcttgaaaaattgccctttcattgttccccacaacaaatgtattcccagagccctctttatgtctttattcctcagactatagataaaggggttcagcatgggggtgaccacagtgtacatcactgaggctgttgcacttgagtgtgagttgcgggtggcagcagaactaaggtacacccctaggattgcaccataaaataaggagacaactgagaggtgagatgcacaggtggaaaatgccttgtacttcccctgagctgatgagattgcatgtatggaagaaattatcttagagtaagagtaaaggatcccagtcaggggacctccacccagcagcgcaactgtaaaatatatcaccatgtgattaagaaagctatcagaacaagcaagttggatgacctgattaagttcacagaaaaagtgggggatttctaaggctgtgcagaaggacagccgtactaccattaagatttgtagcaaggaatacagagcactcatggtccaggatgctagaaccagcagtccacagaggtgagggttcataatgaccatgtagtgcagggggtgacagatggccacaaaccggtcataggccatcacggacaggaggaagttttcaaatccagcaaagagtatgaaaaaatacatctgcatgaggcaggctatgtaggtgatgactttgttctgtgtctggatgttcatcagcatttttggaatggtggtggaagtaacacaaatgtcagcaaaggacaggttggagaggaagaagtacatgggggtgtggaggtgggagtctgagattgtggccaggatgatgagcaggttcccgagcacagtgaccaggtacatggacaggaacagcccaaagaggaagggttgcagtccaggttcttgtgaaaatcccagaagaagaaattctgaaatttgtgtatcatttcctggttccatttgattgaagtgactatcagagagagagagagaaagagggaaacgagacaggcatgcattgctaacctttcagaaataccatcatttatattttatagccaataaattatcttacattttgtgtatgaatctggttctctttaagggatctccatgtcatctctgattaggaactccttcccactctcagccttaactgaagacagcgtacattctgcagttagaataagaacttctggctgggcacggtggcttatgcctgtaaccccagcactttgggaggtcaaagcaggcggatcacgaggtcaagaggttgagaccatcctggccaacatggtgaaaccctgtctctagtaaaaatacaaaaattagcctggtgtagtggcatgcgcctgtagtcccagctacttgggaggctgaggcaaggagaatctcttgaccccgggaggcagaagttgcagtgagctgagatcatgccactgcactccagcctggtgacagagcgagactccatctcaaaaaaaaaaaaaaaaaaaaaaaaaaaaagaatgagaacttcttctatgaatttgaggaatataaattgaatgttgaccatgttcttgtcactgtctagataatgagtgaacaatgctgagaaacaaaagtccctacaatctaatgatgaagaaagaatataaacaaattaaacaatcgaatataaacaaattaaacaatcacataatatgtcagatgggaacaggcgcttggaaaataaacaaagcaggtaaaaaggagggagggtatgaagtgtttcttttgttttttgtttgtttgtttgctgattattattcaagacctgcaaacaaggtgatgtttgaaaaaagatctcaaggaagacagggcaagattcatgaagttatctgttgaagtgggtgcctggcaggaggaatggcagtacaaaaactttgagggatgtgcttctttcttgttttcttttttgagacagagtctcgctctgttgccgggctggagcgcagtggcgcaatctcagatcactgcaacctccacctcccaggttcaagcgattctcctgcctcagcctcccgagtagctgggattacaggcatgcaccaccacgcccagctaattttgtatttttagtagagacggggtttctccatgttggtcaggctggtcttgaactcccaacctcaggtgatccgctcacctcggcctcccaaagtgctgggattataggcatgagccactgcacctggttgggacgtgcttctttcagatgttcaagtccaacacagaagccagtgtggccagggaatcagtaagacggagagtgatgggacatggtgtcagaggatgttgcagaataaggggacctggctgtcaaaacatcaagggacaaagtgtccatctgtctagatgctgttgcacctgcactttattaactggactagaaaggtgtcacatcaattgaaatgcatcccctctttatttccttctggtgtcttgggttctggcctctgtttcattggtctcctttataataaaatatattgaggccaggtccctcttgctctgaaacctgctgtcactccaaagacatgcagccacacactcactcacacacacatatacacatgcagcacactggccgaagagggcccaggcaggagtgcagtggtgtgatcatagctcactgcagcttcaaccacccaggctcaagccatcctcctgcctcagcctcccaagtagttgggaccacagccatgtgccgccacccttggctgatttctacattttttgtggagaccaggtctgcctatgttgcccaggctggtcttgaactcctggcctcaagtgaaccttccactttggcctcccaaagtgctggaattacaggcatgagctactgcatttggctcaaggaaagcttttaatatcagattcttttttccctacagaatgtagaattggtacaagaaattccagttcacaagtctgtatacacatgtaaacttggacttccattttggtatgactgttttcagccctgtgtttaaagaaacataaaagagctgttcaataaacagagtgagagaaattaaacagaccccagtaaggaaaaagtctaataaactcaggtaatccctcagcaaaaggacaaaaatacattgcaagggtgcaacgggtaggttagcaagaaaggaactgactccaaggagacaaaggcttgctggggatcttataggatggaaaataaaagcgaccctggttatggttacatttcagcttccattgtatctcctcgatgcctggcaaaataaataaaagatcaaaaataaagaattctgacatctttattgacttcatggtttttaatttaacaatagtatttaattatgtcggttttaatgattattaaagttttagctttccttttggaactagaaataagtaaataaagttatccaaaagacaagactgtggagtcctaattagggaaatggagtcaggctggctgaagcagggaaaaacaaaaagagaagatagataagctctaagtctgcctttcttcatggtccaggacacacaaccctcgtgtgccaatgactcacaatcttcctgcacccgtcttatcacctgaccctcagctgatggaaaaatgcaagttagctcactgcaaccttggcattatcagtaccgcacaaagccctcttcagctcgcagcacaagcactatcctataaaatccccagcaagcctttgcctccttgcagtcagctcctttcttgctaacctgcccattgcacccttgcaatgtattattatcctttctctaattaaatttgcctttctttatctacaactgtcttggtaaattcttactgcctacatgatgccggccccagatagctgctacccatgacaaaaactaatgataccttttttggcaacaaaggtacagatcgcatatcctaatagaaaaatggagcaaagagaataagccaacaattcacaaaaagaaacatacaaacaatgacaagatttgggcatttttatatgaaacagtaaaagactcatttttttctgtgcctattccatatttacttgatcaattggtttttatatgaattgagagtggatgaagcagtccctttctcacttttcttgtatttcctgtgtggcctttattttattttattattttattattatttttttgagacagagtctcgctctgtcgcccaggttggagtgcaatggtgcaatattggctcactgcaagctcagcctcccgggttcacgccattctcctgcctcagcctcctgagtagctggcattacaggtgcccgccactgtgcccggctaatttttgtatttttagtagagatggggtttcaccatgttagccaggatggtctcgatctcctgacctcgtgatccgcctgcctcggcctcccaaagtgctgggattacaggcgtgagccaccgcgcctggcctattttattttttttttgctacttgtggactttgaattttgatcacttttttgacaaatccaatgagcttgtttctggtctttgtccaacatgaaaatgcctgcccagaccatattacatattaaattttgcacacgtcatgactattctattctattctgttgtattctatttattcattgttgagatagggtcttactctcttgctaaagatggagtgcagtggtgcaatcatagctcactgcagcctcaaatttctgggcttatataatactcatgcctcagcttcttgaatgactgggacgaaaggcatgtgtcaccatacctagctaattttgttcatgctttgtagagacagggtcttgttttgttgcccaggctggtctcaaactcttggcttcatgtgatcctcccagctgggcctcccaaagtgctggaattataggcatgagtcacctcgcttggcctgacaattctattattttacactaagaaatattctttatttgatttacaccttatgacattgcatcatgcacctttatttaattctactgtattttcaccattatagcacaaggtcaaaatgagcagggatgttaccatggatgttcacttatgtatttttttccctccttccctccctccctcccttccttccttctctctctctttctttcttttttcttttcttttttttttttaatggagccttgctctgtcaccaggctggagtgcagtggcgcgatctcggctgactggcaacctccgcctcctgggttcaagcgattctcctgcctcaacctcccaagtagctgggattacagtcatgagccacaacacctggctaatttttgtatttttaatagagtcggggtttcaccatgttggccaggatggtctcgatctcctgaccccgtgatccacccacctcggcctcccaaagtgttgggattacaggcctgagccacagtgcctggctaccttcatattttcataaaaagatgtgacgatgtatgcattattaaaaaaagaattataaaattagaaagaatggcaggagaataaaaccaggttaaatataatcaactgtagtgaataaaattgttgaagtattgaaaattaactgacatgctataataataatttaatcatatcaacataaattaataaattggcaaaaatctagatataaaagaatatggcatacactgttcataaaaaactcttgcacagagcagatgctcagttattatttgctgaatgaatcaggactttgttctcagtatacatgggcatttaatatacagcaagcttgtatttcaatttagttagaaaggattggatatttaaataaatgctgtcataaacagctatttgtctggaataaataaaattggtcacctacctcacacatcttacacaaagtcagaggaattaaaaacttcaatatcggccaggtacggtggctcatgcctgtaatcccagcagtttggaaggtccaggtgggtggatcacttgaggtcgggagttcaagaccagcctgggcaatatggcgaaacgccatctctaccaaaaatacaaaaattagatgggtatggtggcacttgcctgcagtccaagctactcaggaggctgaggtgggagaatcgcttggatccaggaagcgaaggttgcagtgagccaagatcgcaccactgcattccatcctggttgacagggcgagactccgtctcaaaaaaaaagtaaacaatgccttttccatgaaaacagggaaactacatatgaaatctgtgggtgggcaaatcaccttaactaaggcaataattgcagaagtaagatgataggtatatatttaactaaagaatattttaaactttttatggctaataaatttccccaaaagtcaactgaaaaagaatcattgaaaaaaataattttaaacgctggtaactgtataaaaatgggcatatagtaaacataaggcaatcaagatcttgatcaaatatatgaatatttgctcaaagtcagtaatattttaagaaaacagtaagaaatctcacgtccatcagcctgagcggggatggagtggggaactttctcagctgtcatagatttgtgttggaatttttaaacagatggcaaacgggtactctaattttggtgacagaaataagtgtcataatgtcttgtggaaacaatctccagacagataaaatattaaaaacacatacaggctgggcgtggtggcacacgtctgcaatcctagcactttgggaggctgaggcaagtaaattgcttgagcccaggagttcgagaccagcctggacaacgtggtgaaactccatctctacaaaagaaatacaaaaattagcctagcatggtggtgcacaccagtagttccagctacttgggagactgaggtgggaggatcaccggagccaaggaggttgaggcagcagtgagctgagatcatgctactgcattccagtagtagcatggacagaggcttgcacgacagagtgaggctctgtctcaaagaaaaaacaaacaaacaacaaaactccaaaaaccaggaagccagcagatattcctcgccacagtgtttctcaatctcagcactattgatattctgggctagatcactctctttgataaagtctatcctatacactgtgagttgtttagaagcatcaaatcacaggcctaaacaacacacaaatatattcagccacgcaagtgaggaaataaatgcaagtacagctcattagtacatagtctctcacctattaaatattttgtattatctgaatacctagcgtaagagaaaatcctgcaaaatatacgcattatgaactgctgttgcaaaatggtatttgcaagcaatccgttcatctggatttttctcacgggcatagaatcaaactgaaatatgctccattttaaaagtaaaaaggaaatgtctttacatgactgtatatccctccacagccaatacacgatttctctactccccttaattacaaagatgtatgttgtacttttacaaaaatcattttacacctcctattccttctaattgggcttctgtgaccttcactaaatgtcaatagtcgtcacccttgcattgcctagttcagtgttcacttttctttttttgcatcataaaacgagacattacttagttaattaatcaaccaagcaaataaccgcagcaatatcttggctctgggctaggctggactggctctcaggtgatctcaggtaaatattctctgcatctattccatctattgttttcctgcagttcccactgggctctccaactcaccaggaggggatctctccgaggaagagttccttgtgtaagtgcaaattcctcactggatgattgatggtggagactgaagctctgctcagcagactaggcagcaggaaagagtcaagcatctgtctctgagctagacttaggacttcaaaagaaacaatgatattccattcaacccaggggtgcctgagggacaacagcagatgaaatatttatagcttcccacatctgctcaataggcacatttcttcttgttatttgaaaccctgagtacattatgtccctgtgggacattgttttgcacagaaagaaaaaaaatcctgcagattctctgttcccaagagactggatgaaccagtctttcttactctttcaacatgaactctcctttcttccagaagtctaactttgtaacaactgtcccaatcctgagacaaagttttcttcacatctaagactgagaaacccatcttgcctactccccttaaatctccaaagcatcgacttattgtgggaatacagcctctgataccataagaaaatttctcttttttttttgagacggagtctcactgtgtcacccaggctggagtgcagtggtgtgatctcagctcactgcaacctccgcctcctgggttcaagtgattcttctgcctcagcctcccgagtagctggaactacaggtgctcacccccatgcccagctaatttttatatttttagtagagaaggggttttgtcatgttggccaggctggtctcgaactcctgacctcaggtcatccacccgccttggcctcccaaagtgctgggattacaggcgtgagccactgtgcctggcccaacatctgaaaatttccatctcattcttcaactagagggagtactgtgttcctttgatataaatcatggcttggctgtactccttggcttcatgatgttttcaccaaaacaatttgtaatttaatgcttgtcagacaaattaagaactgtcttttagttcttcattgataaaatgtgtaccaattacaagagatatatttagacccttttatgcacattgtcctgagaatggcaccttataaggattattttatctaatgtttataaatgtttattttatgtggtcggtactgtcatgagcatcattctacgtatgcagtaatggggctcagaaagattcagtgatctgctcaacattataaaccaagaaagggatgaatggttgaaactccttcatgatgttttcagttctcatgcttgaggccagtagtttaaaaacaggaatgaggctgcatgtggtggctcacacttgtaatcccagcactttgggaggctaaggcaggcagataacctgaggccggagttcgagaccagcctggccaacacggtgagaccccgtctctactaaaaatgtaaaaattacctgggcatggtggcatacgcctgtagtcccagctactcaggaggctgaggcaggagaatcacttgaacccgggaggcagaggttgcagtgagctgacattactcaagcctgggtgacagagcaaaactccatctcaaaaaaacaaaaacaaagaaacaaaaagcagggatgattttgccaccaaaggacacttgaaaatatctgagaaaactttagttgtcacaactaggaagatgttactggcacctgggggttgaggttgagaatgctgttcaagatccaacaatgcaaatgatacccccaccacaaatgataatccagcacaaatgttaacatggaggaagctgcaaacactattctagaccagaacatctccagcttcaaagtttatatgaattgcttctggatcttgttcaaatgtggattctaatttatcaggtctaggatggggtccagagattctacatgtgtattagtccgttttcacgctgctgataaagacatacccaagacttggtaatttataaaggaaagaggtttaatggactctggactcacagttccacatggctggggaggcctcacaatcatggtggaaggcaaaaggcatgtcttacatggcagcaggcaaagcgagaataagaatcaagtgaaaagggaaaccccttataaaaccatcagctctcatgagacttatttagtaccatgagaaaagtatggggaaaactgcccccacgattcggttagctcccactaggtgcctcctgatataggagttaagaaggaattacttaggcagatagcaagggcatgagagtcctcagtaaggcttttctcttttaatgaaaagcagcctcaaatcattttctaacaaagagcagcctgtaaagttgagctgcagacatagataagcaagctgggagtttgcatgggtgaatgctggcagaaactaaggactagacgttttcaagatggtggctccatcttcccttctctgccagccacgtgcactgtaaggagcagacaagatggtgtcatggcactggccaggtaaaaaccccatctgcataataaacaattggggtgggatggccagcctctttgcaggctatgtaaatgacacacttggtccaaccaatcccctgggccctatgtaaatcagaccccacctcctcaagcccctctataaaaccaaccgaatcccatgggcaacagggagatctgtttggaacccgcctccatctacataagggagcttttttcttgtttctttcatgtattaaactttccactattaaatccacacctcgtgcatctgcgtcttcattttccttagagcaggacaatgaaccttgagtatttccccagacaaacgatgccacttcaccattagccaaatacatctctgttcattataaattgcccagtctcaggcattctgctatagtagcagaaaacaaactcacatttagcttctgcatatacaagtttacatgtgtctcttgagtaaatccctcatgataggaaatgaaacttttagaactttcatttcttatctataagttctggaaatttcatcgatcctatgaagttattgtgaaaagtaagcaatattttaatgcttggaaagttactggaacagaataattgttcgatcaatagcagctattgttattgtctcagttttgcatttacttagctcactgtgacaccagaaatgtctcttgcgagaggatgtgagtctagtgttaccctgttcctgttcctggaatacagctagttgtgatcttgaagggagacctcatcccagggactcaaggaggggtcagaatgtggggaatccaccattccatgctttgttatattcaaggatgtagcctctgaccctattctttttgagactgagttttcctctgttgcccaggctggagtgcagtggcacaatctcggttcactgcaacctccacctcctaggttcaagcaattctcttgcctccgcctcccaaatagctgggattacaggcttgtgccaccacgcccggctaattttttgtatttttagtagagacggggtttcactatgttggccaggctggtctcgaactcctgatctcaggtgatccgcctgccttggcctcccaaagtgctgggattataagcgtgagccaccgcacctgggcctgcctctgaccctctaatgctgactccaaataaccacagcaagaatttttagactctttcaatccactttacttgttctgctcttgggaatatttgcaaagctgctatttcttgttgcatcaaattatttctataaattttctcatcctttttgttccacctccacagcatgtaattcacaaatgtttgctgccaacagaagtatgaagttcttgcgtgtctgtttctttctaggataatttttttttttacaattatttattaactcctctattctctgtaggaggactgtaaatcaccactatggactctgggtcttaagggtgcctcaattgtaaggagaacatagctcttcaatagttgacactgaacttggacatgtgacttcagctaaatgtgaatagtcctgaaatgtccaatgcctgagaagaagctgtaagagattccatcacttggctaggcacggtggctcacgcctgtagtcccaacactttgggaggctgaggtgggtggatcatgaggtcaggagatcgagactaccctggctaacatggtgaaacctcatctgtactaaaaatacaaaaaaaattagccaggcgtggtggcgggtgcctgtcatcccagctactctggacgccgaggcaggagaaaggcgtgaacccaggaggcggagcttgcagtgagccgcgattgcaccactgcactccagcctgggtgacacagcaagattccatctcaaaaaaaaaaaagagattccatcacttttcttgagcttcttctctcaaattgtccttgctgtccaaaggtcaagaacttgatttggatagccctatggactgaatatttttgtcccttccaaaattcgtatgtcccaagtccccaaagttaaaacttctccaacattgcctcctatgtgattaaaaaatagcatgacattaaaccattcactattaggatgacttgttatgcagtagtagcttactgatacaataatcaatgcaaacacaactaaagagattcagaataatctgatgtttctttgttctggacctttgttctgttatttgaaggaaatatttatgattacctggttattcatatttatttcagataactgtattaaaatgagactgcctattagattttcttcaggtagctaggagaggttgaaagtaaatatgttgggaaaacactgactttttttcacatgctaatccaccaggttacttttgagtaacgctgagtccagaaaagcctccaaaaatgtctagttgatggattactctttttatagaaatacgtgttcactgtaatttttgcctttcctccaaaacaacccttggtgttcttccatacatcataggctgcgatgcctgtagctgcttacacattccttccagagcacatataatgtttcctccaagatataagccccaggtctggggtggtggaggtgtggagatccacttttcctgcggccacctaagaccatgcttctgtctgtaagtttacctggtaaattaccctacccaacaaactggcttgtctgccttgtcctttgacttctcagatccttctgcacttgggaactgctttgcatatatagtcctttcatggaataacacatatgtttttgaaggaaagaactgtgaccttcaatcacaagtctctattcccagaggcaacactgggtagaaattcgagctcttgtgtgagtcatcctttgatcatgagagttgaagagtgtttagagtataaaagagacaaaacaactgaagataaagtaaatacatatattgttcacttgtcaacactttgatgcttatgacatttttaaggaagagatgttaggacaatggaaggagtcatatttgtaggcagcactggaaaacattaggcagaagtagcagagtgatgcaaggacattacatacaccatggcactcaatccttcactcagatgaacaaacctagtgacgcgtggacaccaggctcctctacttcaatgagtagatgtaccccaacgaaaacaaatattccatagttatttcatgtatgattgaaaattatattccgtcatatttaaggtcatctctgactctaagaagaacagtgtaagctctataaagtagttgaggaacaaagaagtttaaactccaggaaataaatggaaggggcaagtcttccttccaccatcttattaacaaatcaccatttctggctctggggcttagagctctgaagtcacaggcctttcttgaaaaatagcctttctattgctttcctctgaagaatgttttcatagcaccctttatgtgtttattcctcagactgtagatgaaggggttcagcatgggggtgaccacagtgtacatcactgaggctgcagcacctgtgtgtgaattgtgggtggcagcagaactaaggtacacccctaagcatgtaccataaaataaggagacaactgagaggtgagatgcacaggtggaaaatgccttatacttcccctgagctgatgagattgcacgtatggaggaaactatcttagagtaagagtacaggatcccagtgaggggaccaccgcccagcagcgctactgcaaaatacatcactatgtcattaagaaaggtgtcagaacaggcaaggtggaccacctgattaatttcacagaaaaaatgagggatttccatgtgtgtacaaaagggcagtggcaacaccattaagctttgtaacatggaattcagaacactcatgatccaggatgccagaaccagcagtccacagagttgagggttcataatgaccatgtagtgcagagggtgacagatggccacaaaccggtcataggccatcacggtcagaaggaagttatccaatcctacaaagagtaagaaaaagcacatctgggtgatgcagcctgcataggtgatgactttgttgtgtgtctggatgttcaccagcatcttcgggacagtggtagagacaaaacagatgtctacgaaggacaggttggagaggaagaagtacatgggggtgtggaggtgggagtctgagattgtggccaggatgatgagcaggttcccgagcacagtgaccaggtacatggacaggaacagcccaaagaggaaggcctgcaattctggttcctctgaaattcccaggagaagaaattctaaaattattgtattgttccatgatttcatcttgtgatgtgactaccagagagagagagagagagagagagagagtgaaagaacatgaaacaaacatgcattccaaaactatcagaaatgttatcatttatattccacagtcaagaagttaatatctttttcttaaaaaattatttttaagttgacagataaaattatatgtatttatcacatataacatgatgtgtttttaaaagttttatttagtttcagggttacatatgcaggtttgtaaaacaggtaacatgtcatgggggtttagtgtataggttatttcaatacccagtaataaccatagtacgtaataggtgttcgatccttactctcctcccaccttccaccctcaaataggtcccagtatctattctcttgttttcttttttgagatggagtctcgctctgtcacccaagctggagtgcagtggtgcagtcttaactcattgcaacctctgtctctttgttcaagcgaatcttgtgcctcaacttcccgagtagctgggattacaggtaggcaccaccacgcccatctaatttttgtatttttagtagagacagagttttgccatgttggctaggctggtcttgaactcctgacctcaggtgatccgcctgcctcagcctcccaaagtgctgggattacaggcatgagccatgtacctggactattctcttctttgtgttcacgtgcactcaatgtttagctcccaattattagtaagaacatatggtatttggtttcttgttcctgcattagtttgcttagaataatggcttttagctacacccatgttgctgcgaaggacattatcttgttctttattatggcttcgtaatattccatggtatatatgtaccatattttctttatccagtctaccgttgatgggcgtctaggttgattctatgtctttgtaattgtgaatagtgctgtgatgaatataagtgtggatgtgtccttatggtagaacaatttatatttctttgggtatatacctagtaatgggattggtaggtcaaatggttgttctgttttaaattctttgagaaattgccaagggtctaatatcagaatctataagaaacttaaacaaattaacaagcaaaaaacaaacaaccccattaaaatgtgggcaaaggacacgagcagacacttcaggaaaagacatacatgcggccaacaagcatattaaaaaatgctcaacgtccctaatcattacataaatgcaaattaaaaccacagtgagataccatcttacactagtcagaatggctataattgaaaagtcaaaaaatagcacacactgctgaggttgtggagaaaagggaaaacttatacactgctggtgggaatgtaattagttcagcccctgtggaaagcagtttggtgatttctcaaaggacttaaaacatgatgtgttgaagtacaaatacattgtggaatggcaaaatctagctaattagcatctacatgacgtcaccttgtcatcatttttgtgaggagaacacttgacattcacccttttagtgtcttttgagaatacagtgtatcacggtgaactgttgtcactatgctgtgcagcacatcttttgaagttattcctcctgtctaactggaattttgtgtctattggccaacatctttctaactttccccactccacttcccccagcctccattctacaagaagttaatttctatattgtttgtgaatctggtccccgttaggagatccccttgccatctctgaattccttcccactctcagcctttctctgagggcatctactctacaagtttagggagaaaaatctttcatgcatttggggaatatcaagtgaatttcgacatgttccagatgctgtctagacagtgagtaagtggtgctataaaacagaagtccttgtgttagtttgctgagaatggaacagaaaaccaaacaccacatgttctcacttataagtgggagtcgaacaatgagaacacatggacacagggaggggaacatcacacactggggactgtcgggggtacgggataaggggagggagagtattagaacaaacacctaatgcatgcggggcttaaaacctagatgacaggttgatgggtgcagcaaaccaccatggcacatatgtacctatgtaaccaaactgcacattctgcacatgtatcccagcacttaaagaataatttaaaaaacccctccagaagtccctatgctctaaacacagagaaaatacaagtaaatttgtaaaataccacatgctatgtcagatgatgatagatcctatactatgtcagatgacgacagatcctatactacatcagggcgtgacagctcctacaaagtaaagaaagaaggcaaaaaagaaaacatggatgaggtgttagtttttactttgctttcctgtaagaccagcagacaaggtgacaatggaacagaagacagggtcagagtgaccaccttccctgcagaagtgtgtgccaggcagaaggaaagatcaatgaaagacgctgaggaatgtgcttctggcagatgttcaaggctaacaaggaatccagtgtagcgagagaatgagcaagaagagagggatgggagatggtgtcagaggatgatgaggaatgaggtgacctcctaaatgctgaaatttgataacacaaggagttcctcggtcctgatgttgttgcatttgcactttggtaatttggttgcaaaggtgtcccattatttgaaatgcatctcctctttgtttttcactgttgccttgagttctgtgttttttttttttttttgagatggagtctcactctgtcacccaggctggagtgcagcagtgcgatcttggctcactgcaacctctgcctcctgggctcaagtgattctcctgcctcagccccctgagtagctgggattataggcgcctgctaccacacccggctaatttttgtatttttagtagagatggagtttcgccatgttggtcaggctggtctcaaactcctgacctcaggggatctgcccacctcggcctcccaaagtgctgggattataggcgtaagccaccatgccaggccaacttctggtcttttaattacaagttgccttttggaatatattggtcccaggttctttttctctgaaaattcctctcgccctagaggtgcacacacacacacacacaaacacacacacacacacacacacacacacaatgcatacacatgtgcatcacatcgtggcctcctagggctgtgttactcctctgctcttctcacccctagtctcactattaagaaggaatggaggccaggcacggtggctcacgcctgtaatcccagcactttgggaggctgaggcaggcggaccgcctgaggtcaggagtttgagactagcctgaccaacatggtgacaccctgtctctactaaaaatacaaaaattagctgggcgtggtggtgggcgcctgtaatcccagctactggggaggctgaggcaggaggattgcttgaacctggaaggcggaggctgtggtgagttgagattgcgcccctggactccagcctgggcaacagagcaagactccatctcaaaaaaaaaagacaagtgaaaatggtggtgatatatatgaattttgcttaaaccaagcaataatttaaggcaacaagaaatctctgtcacacgcatcagcctgggaaaaaacttaaggagctaccacattgagtagggttggaacttacaaacagggagagaagggaaactctaattttgctggcataaatgtgaagtgatacacctggatacagctataaatactaaaaatacagatattcattcactcgttttctcaatctcagcactacttaaattctaagccacattattcattgtggtggggtctgtccctgttgtctgctgacctttacagggtgaaagccaaatatgtcattgctcaatgtcccctgggggacaaaatcatgccacccactcaagtgagaacgacaattttaacataaaaattccaaaatgtgggaggccgaagcgagcggatcaggaggttaggagtcaagaccagcctgaccaacacggtgaaaccccatctctactaaaaataccaaaattagcctggcatggtggcatgcacctgtaatcccagctacttcgggaggctgaggcaggagaatcgcttcaacccgggaggcggaggttgcagtaagccgagatcgcaccattgcactccagcctgggtgacaagagcaagactccgtcttaaagaaaaaattccaaaatgtttttgtagcatttataggataggaaaggaaaggagaagacaagctaaaaacaactgcactaaaatatagcatatttgtgatatgcataggattttgtctacgtgtttgtataagtgttgtatgaatacaaaagtgtgcataatatagaaagagaagttttaaaagaaacgaacttatacaacaaggaatgacagttaaaatgcaattaggttaagcacagtggtttcaaaacaactgtctaaagcaacatagaatgaaaatctgaaaaaattttaatataatcacataaaatagtaataatttaataacatcaaaatgggttacaaatttaagattaaactaccagtcatggaaactaaagaatatgacaggaagtcttttaaaattatctgcgtgtggtggttggtgcctgtaatcccagctactcgggaggctgaggcaggagagtcacttgaacccaggaggtggaggttgcagtgatctgagatcgcgtcactgcactccagcctgggtgacagagcgagactccatctcaaaaaaaaaaaaaaaaggaaaaggaagtagtgtctaaggttataatttgatcttatataaagatgtaaggattcaagcatgtttatgacagatataaatgtgacacaacttctagatatggattgaatacaaaaagctaaaaggcacaataaggaatgacagagatgtgaaaagaagttggaaatttatatatagaaggtgatttattcagccaaaagatgcagaagaactttctacatttataaggcaattagggagacacaatgtgaccgatggatggatttggctacacaagctttttaaacttgcacactgtcctctcaaatacattgaaacttacacaaaagaacataaaacagctaagaaaaaagtacatataagaacattccttgtgtaataactcacataaaagaactaaatgacaaatgccaaaattggcaaaaactccaaagcttatatgttaaagaatgtaataaaaaacacgaataaaatcactttgaatccatcatacaaaagccaagaattttcatagataatttccaacagagtgataaatgtctgacaaacacagatgtagtcagtcttaccagtaaggaaaaattgcaaagtaaaggccattaatataccagttttcaactcttaaataaaattttaattcatttgaatacctagcataagaaaagcagctgaaaactgtacgtttcataaactgctgttgccaggtagtagttggaaaaaatttattggtctggatctttctcatcaatatggaaacaaactcaaatatgcccttctatttttatttatttttatttttttgagatggagtctcgctctgtcgcccaggctggagtgcagtggcgcgatctcggctcaatgcaagctccacctcccgggttgacgccatcctcctgcctcagcctcccgagtagctgggactacaagcgcccgccaccacgccaggctaatttgttttttgtatttttagtagatatggggtttcactgtgttagctaggatggtctcgatctcccgaccttgtgatccgcctacctcggcctcccaaagtgctgggactacaggcgtgagccaccacgccggaccaaatatgcccttcttaaaaatgaaaaattggcggggccaggtggctcatgcctgtaatcccagcactttgggaggccgaggtgggtggatcacgaggttaagagattgagaccatcctggccaacatggtgaaaccctgtctctactaaaaataccaaatttagctgggtgtggtggtgagcacctgtaatcccagctacttgggaggctgaggcaggagaattgcttgaatccgggaggcagaggttgcagtgagccaagattgtgccactgcactccagcctgggcgacagagtaagactctgtctaaaaaaaaaaaaatgccctcacttcctttcgtatcccccatagctaataccctacttctctttcccacttaattgcagtgatgcttgggcagatgttctgctttcactggaactactttagaccccacattttctcttctaattgggcttttattacccttacttgattgtcggctatcattctccattgctgagttcaagatgcacttctcttcttagcttcataaatgaagatatgaatcaattcattcaccaagcaaatacccacagcagcgtctccactctgttgcagctaggattggctctttcgagatctcgggtctatgttcacaacttgcaatctccctgatcctttcctacggtacctattggactcaccctgttgggttttctgaaatgaaggtctcaatctagaagtgcaaattcctccctggatggttgatggtggagactgaggctgtgtcccaagacaagacagtaggagaaaggaaagaatcagtacccctgagccagcagatatagactccgaaagaaacaaggatgtcccatccagcccaaggttgcatatgctgagggacacctgcagcggagaaatttacagcttcatatgcctgctcattggagacatttcctcctgttattcaacccctgatcacattcagtccctgtgggacattgctcttcatggaaagaaatttttttcttgcatactcagttcccaagacatcagattaaacatcaggcgaatcgagtcgttattattccttctccatggatttgtctgccttccaaaggtctaacctcccatcacttccctccaaccctgagggaaagtttcctccgaagtttaaactgaggaatctttcttgactaagccccttgagtctccaaagcattgacttgtggtaagaacacaggttaagagccgtcatttaatccttcatttataaaacatttgataattgtaagagatacatttacatcttttcatgcaagttacccttagattagcaccttataagagtgatctcattaattttttaaaaaaagtatttatttatttaaatggacagatataattgtatatatttatggtgtccaacatgatgctttgaagtatatatacattgtggaatggttaaatctagctaattaatatatgcattatctcatgtagctatcatattcgtagtgagattcctttaaatccacctttggcatttttcttttcttcctcttcttttcttcttcttcttcttcttcttcttcttcttcttcttcttcttcttcttcttcttcttcttcttcttcttcttcttcttcttcttctttcttcttctctttttttttttttgagacagagtcttgctctgttgccaggctggggtacagtggcacgatcttggctcactgcaacctccacctccagggttcaagcgattctccttgcttcagtctcccgagtagctgggattacaggcacccaccaccacacccggctaatttttgtatttttagtgaagatggggtttcaccatgttggccaggatggtctcgatctcttgacctcgtgatccggctggcatttttcaagaatacaatatgtcatcattaaatatagtcaccttgctgtacaatagatctcttgaatgtattcctcctaactacaattgtgtatccttggacaaacatctccccactcctcacgctgcaactgccccagcctctggtaaccaccattctactcaataattctgtgagatcgacttgtttcaatttcatatgagtgagatcagatggtatttgtctttctgtgactgtcttatttcacttaacataatgttctccagactcaaccatgttgtctcaaatgacagaatttccttcttgtttatggctgaatagtattctattgtgtgtgtgtgtataatacataacgaaattatataatattttaaaatccattcattcattgatggacacgttgattgatttcacatcttggattcaggatattctggacataattctgcatatgaacactttgttggatctgtagtttgctgataacattgaccacatatctaaactcaacatttttattccacccctcactcctgacccattttatggtttggaggtcacaatttacagctttttatattgtgtatcacttagcaaattaagagttacaattttcatttgatgttctgttaattgcaattgattgcaatccataacttgctatactattccgataaattttataatattagtaacctgtcatatgtatacaagatctacatggggatcaaaatcagttatattacatgtgtactttctaataagcagttattgtacattcttacttttttgatggggctacacacacacagacacagaaacatacaaacatacacagacacacacacacacacagacacataaagtcttgacaaattggaagacctccataggagaatggctcacatacagaaaaatctaaaaagtatcatagggtgactggaagaagaaaagttggttgttttttctgtacatatgaagaagttggttgtttttcctgcacatgtggagacagtcctgtctgccactgaaaagaatgctggcgtttcttcttgtacatcatttcatgcggcccctactgggtaccctggattctctcctgactccaatctcttctcaatcatacactcagggtatctgcaacaaaacttccacctcaatttccccctcttttttcaaatttctatatctcttgtatctacaattctattctctgtctccatgaggtcaacttctttagctccttcatatgaataagaacaagcattattttctttctgtgcctggcttatttcacttaacatagcagcttccagtcccatccatgttgctgcaaatgtcataattttattcttttttatggctgaatagtattcaattgtgtatatgtactgcattttctttatctatttgtgcactgatggacactttggttgattccatatctgaactattgtgaatagtgttgcaataaacatgcaaatgcacgtatctttttgatacactgatttcttttcctatggttatagatccagtagtgggattgctgcatcagatggtagttctattttagttttttgagaaatctccatattattttccataaaggatctactaatttacattctaaccaactgtgtataagagttcccttttctccttatccttcccagcaactgtttttttttctttttaataatatccattctaatttgggtaagacgaaatctcactgtacttttttttttttatcgttgttgttgttggtttttttcttgagatggagtcttgctctgtctcccaagctggagtgccgtgatgtgatctcagctcactgcaactccgcctcctggattcaagcgattctcctgtctcagcctcctgagtagctgggattacaggtacccaccaccatgtccggctaatttttgtattttaatagagacggggttttgcaatgttggtcaggctggtctcgaactcctgacctgaagtgatccacctgcctcagcctcccagtgtgctgggattacaggggtgaacccctgtgcctggcctccaccttatttccaaccctactttggggataactttgggaaagtgggaaaatgacaaaggaaagaaaactgttggatacttgagagcagaaaactttttaaaggaaaatcataaactttataaagcagttggaatcaaagaaatggaaactccaggtagataacagaaggagtaacttctacttccacaatctcattaatgaatcatgatttctatctctgggaattagagctctgaaatcacaggcattaattgaagaagagtccttttattgcttccttctgaagaagcgtttcagagcatcctttaggtctttattcctcagactgtagataaaggggttcagcatgggggtgaccacagtgtacatcactgaggctgttgcacttgagggtgagttgtgggttgcagcagaactaaggtacattcctaggcttgtaccataaaacaaggagacaactgagaggtgagatgcacaggtggaaaatgccttgtacttcccctgagctgatgagattgcacgtatggaggaaactatcttagagtaagagtaaaggattccagtgaggggaccaccgcccagcagcacagttgcacaatatatcatgatgtcattaagaaaggtgtcagaacaggcaatgcagattatctgattaagttcacagaaaaagtgggggattgctatgtctgtatagaagggcagtggcaacaccattaagctttgtaacagagaattcaggacactaagaatccagtctatagaactgagggttcatgatgattgtgtagtacagaggatgacagatggccacaaaccgatcataggccatcacagctaggagaaggctgtccaacactgcaaatagtaggaaaaagcacatctgggtgatgcagcctgcataggtgatgactctgctctgcgtctggatattcaccagcatcttcgggacagtggtagacacaaaactgatatctgcaaaggacaggttggagaggaagaagtacatgggggtgtggaggtgggagtctgagattgtggccaggatgatgagcaggttcccgagcacggtgaccaggtacatggacaggaacagcccaaagaagaagggctgcaattctggttctgctgaaagtcctagaagaagaaattctgaaattcgtgtatcattccctggtttcatcttgttgatgtgactaccaaaaaaagagaaggagaatatgacacaagcatgccttacaatcctaacaatataaatgttgtcatttatattcttcagacaagaagttaatttctttttctaaaatatgtatttataaaattacagataaagttgcatctatttatcatgtacaacataatatgtttaagtataagtacaaagtgaatggccatttgtagctaattaaaatctgcgttatctcacaaaattatcattttcgtggagagaacacttaacatccacttttgccatttttgaaattacaaaatatcttcatgaactatagttaccatgatgtacaatagacctctcgaatgaattccttctcattaactctcattttctattctttgaccaacatcttcccaactttctttgtccccaacctcctcagcttctcataaccttcattttacaagaagttaatttctatattttgtgtgtgaatctgattcctgttggggatccccttgcatctctaatttggagttccttcttactctcagcctttccctgagggcatgtattctatagttttaagaagaaaatttttcatgcactttaataaagtaaattgaattttgacatattccaggaatttagacgatgagtgaatggtgccataaaaccaaggcctcaacaatctaatgatggagaaataatataagtaaacttttaaaataccatatactatgtcagatggtaacaaatcttatgaagaaaaagaaagaagataagaagaaaagcatggatgaggcatcatttttactgggtgttcaggctagaccagcagacaaggtggcaactgagcagagaccataatgaagacccggtatgaatgtgcagaagtgtgtgcaaggtggaaggaaggatcaataaagcatactgagaaatgtgcttctttcagatattcaaggccaacaaggaagccaatgtggcaggagaatgagcaagatgagagggatgagagatggtgtcagaggatgctgagggaggagatggcctgacagctgctgaaactggaaggcacaaggaggccctctgtccagatgtcgatgcatttgccctgtatgaatttggttgcaaaggtatcccatgaagtgaaatgcatcccctcttcattttcttcatttgccttgagttctggagttctggtatctgtctttttttgttgttgttgttggagtcttactctgtcgcccaggctggagtgcagtggcgtgatctcggctcactgcaccctctgcctcctgggttcaagagattctcctgcctcagcctcctgagtagctgggattacaggcatgtgccaccatgcggggctttttttttttttttttttttttagtggaaacagggtttcaccatattggccaggctggtcttgaactcctgaccttgtgattccttcgcgtcagcctcccaaagtgctgtgattacaggcataagccactgtgcctggcccgctccttcttaaaataaaaaagaaatgccctcacttcagtgtatatacctccacaactaatgtcctatttctcttctcgacttaattgcaaagatccctgggcaaatgttctacttttactcttttaattaggcttcccccatttcctcttctaatgggacttccatttccgttactactaattgtcaactattatcctccattgctgagttcaacatccatttctttttagcatcacaaataaatacatcaatcaattaatgactcaagcaagcaaacaaccaaagcaatctctctgctctgggcttggctgtattggctctcaggggacttcaggtctatattcatggctctcattttcccggagcctttcctgtagtacctactgcgcacttggactcaccctgatggattttctggaaggaaggtgtcgtccatgtggatgtatgaattcctccctggatggttgatgatggaaactgaagctctgtcttgagacaagacagcaggagaaggtcaggcatcagtactcgagccagattgaggactccaaaagaaacaagcatgtcccatccagtccaaggtagcatatgctgagggacagtgacagcggagatatttacggatttgtgtatctgctcattaggcacatttccctcttgttattcccaccctcagcacacgatgtccctgtgggacattgctctgcactgaaagaatttttttttttcttgcatactctgttcccaagacattagggtaaacatcaggtcaatccagtcttttttttttttgagacagagttttgctctgtcacccaggctgcagtgcagtggcacgatcttggctcactgtaacctccacctcccgggttcaagcaattctcctgcctcagcctcccaagtagctgggactacaggtgtgcgccaccatgcctggctaatttttatatttttagtagagatggggtttcaccatgttggccaggctggtctcgaactcctgacctcatgtgatccacccgcctcggcctcccaaagtgctgggattacaggtgtgagccaccatacccagcccactccagcctttgttactttttctatatggacttgcttatcttccagagacctgtctgaaacctgaacccaacctggagtgaaagttttctccaaagtctaaactgaggcacttgtgaagaggtcctttggatctctaaagtttagttttctgcttcaatgatctgtctaatgctggcatggggtgtcgctttatgaacatacttgcatgttgccctttttgctttataaatgtagatgtttggctaagttaatctcatgttatacacacatttccaacctgattttatcagttcattcttctttattgtgacttttggctttttgtattagatctctttctggaagttgcatcacatcacctttggctatcatttaaaaatcattcttaggccgggtgtggtggctcatgcctgtaatcccaacactttgggagatgggtggatcacctgaggtcaggagtttgggaccagcctggccaacatggtgaaactctgtctttactaaaaatacaataattagctgggcatggtggcaggtgcctgtaatcccaggtgcctgtaatcctactcgggaggctgaggcaggggaatcgcttgaacccaggagacagaggttgcagtgagccaagatcacgccaatgcattccagcctgggcagcaagagtgaaacttcatctcggaaaaaaaaaaaaaaaaaaaggaaaagaaaaaaatcattcttctttatcatctgactacagctcatcttgatctctcatatagcagtatttgcaacactattatcgtgttgccgtttatgtctcttcctcggtctagaagcagtggctttgtgaagaatctggggcttcgatgttgggtaggtatatatttggatagttaaatctttttatgaattgaacattgaacgttttatcatcatgtaatgcctttcctcatcctcctttttttttttttttttttttgagacagagtctcgctctatcgcccaggctggagtgcagtggtgccatctcggctccctgcaagctccgcctcccgggttcacaccattctcctgcttcagcctgcctagtagctgggactacaggtgcccaccaccacgtccggctaattttttgtatttttggtagagacggggtttcaccatgttagccaagatggtctctatctcctgacctcgtgatccgcccgccttggcctgccaaagtgctgggattacaggcgtgagccaccgcgcctggcccttcgtcctcctttttgactattgttggtttaaattcttttttatctgatacaagaataatgacccctgctctcttttgttttccatttgtgtgataggtcttttcccatcattgattttgagcctatgggtgttattacatggatctcttgaagaaggtgggaagaggggccttgtttttatttttcaatttttaatttttttttgggtacgtagtaagtgtgtatattactacagggtacatgaaatattttgaaactgccatgcaatgcacaattatcacatcatggagaagggggtacccattccttcaagcattcattctttgtgttacaaacaatccaattatagcctttaaagtatttaaaaatgtacaactaaattactactgaccataggtcatcaccctgttgtgctatcaaatagtcttattcatttttttctattttttttgacccattaaccatctccacctttcccatatcactcacttaccttcccagcctctggtaaccatccctttttgtgtgtgtgtgtgtgttttgtttgttttttgtttttgtttttttgagatgtaatctcactctgttgcccaggctggaatgcagtggtgcaatcttgggtcactgcaatctctgcctcctgggttcaagcgattctcgtgcctcagcctccctagtagctggtattacaggtgcgcatcatcatgcctgggtaatttttgtatttttagtggagacagcatttcaccatgttggtcaggctggtctcctgacctcaagtgatccgcccgcctcagtctcccaaagtgctgggattacaggtgtgagctgctgtgcctggccagtaaccatccttctactctctatgaccatgagttcaattgttttgatttttagatgccacaaaaagtgaaaacttgtgatgtttatctttctgtgcctggattattttacttaacacaatgacctccagtttcatctgtgctgttgcaaatgacaggatctctttattttttatggctggatggtactccattgtttgtaagtaccacattttctttattcattcatttgttgatggacactgaggttgcttccaaatcttggctattgtgaatgttgctgcaacaaacatgaggatgcagatgtctctttgatattatgatttcctttcttttgggtatacacccagcagtgggattactggatcatatggtagctcttttttttagtattttgaggagcctccaaactgtcctccatagtagttgtactaatttacattcccacaaacaatgtacgagggttctcttttctccacatcctcaccagcatttgcttacctatccggccaggcatggtggctcccacctgtaattccaacactttgggaggctgagatgggcagatcacccaaggtcaggagttcgagaccagcctggctgacatggcgaaaccctgtctctactaaaaatacaaaaagtagctgggcatggtggcacacacctgtagtcccagctactcgggaggctgaggcaggagaatctcttgaacatggcagtggaggttgcaaccattttgtgctctgtatttaacaaaacaaaaacatctgttgaataaacagagagagatgaatgaaataggcatgagagggtaaaagatctgataggtacaagtggtcaatgagagatcgtgatgcagaaagcttcctcatttctagcagcaccccaagcctggttaaatacctgtgaagccaagaaaaattaataatgaacaaaacatggtctatttagagtgtcaagacaccttacagattgaataccccatgagaaaaatgagtgaagggaataagcccagaattcaccaaagaaaacataaaaaatgcaacaatagtgagttgttttttttaaccagatgcaatggtaacatagttttgtaaaaaataataaatgcaaaacttctgaaatcagaagaaaacaggtttggaatgtcagagctaccttgaatcagctgtctgaacttggagaatcaacaagaccattcaaaatgttaatatgtttttctaaatagtgagatagcagcatctatcctcctgagatgggagatgtaatcaatctgtgtaaggtgctttacattgttccttcctgttagtgaatgaatagttatcaccagtgatgaagtgaggctgatatttttccttctggctctcaaaagtctcccttttttctctatcacccggttacccaattcaatggtcctgttttagttcctcatgatttcttccaggcttctgaggctggcatctctatatacccatattctcattgatccagaaaaatctatatttcacagctgatcacctaacactctggcttaaatgcccaccctgtgattccccatgggagaaagaagctgaaattctacagcttcaaacacaaggcttgactctgataccttcacactgccctaccccaacccacatcaatcttccataagttgaccaagttgaccttgactttcagcttcaccagaagccagagcttcaatgctcaatgtcttcatacatttatctccttctgcttgaacttgttccataaaatagcagaagaagactaatattaaaaaaataagtctttgtgttctcacatatacctgggatataaaaaattaaaactcatagaagtatagagtagaatggacattaccagaggataggggtgaggacagggtcgatacaaaaaggaaaatgttagtcaaaggctataaagtttcagctggacaggaggaataatttctagtgctccattgcacaacatggtgactattgttgagaataatgtactatatatttcaaaattgctaaaatattaaattttaaatgttctttccacaaacaaatgatagatatgtgaggtgatggataggttaattagctccacttaatcattcaacagtgtatacatatatcataacatcacgttgtacctcataaatatatacagttactattggtccatcaaaaattaaatttaaaactaaattttaaaagatctcatcaaaaaagacaaaaaggtagctataaggaaaaagggttataaaataaggtggaaatacatatgatttacttctactaaagatgcagaagaattttctaagttaagaaaaattggagagtgtgggttcatgataggaccaactgagagatttgacaaagtttataaaacaaagtttataaactttcttttcttcatcctgtatatatatatatatatatatatttttttttttttttacacaatcccttgatgtacatctatacatacataaaaaattaactattattcagcaaacttggtgaaaaatctctaattcttcatttgaatgaatgcaatcaaaagaataaaaacactcacactctagaacataaaagcaaagaacctgcaaaatctgcaatagagaaagtaaatggctaacaaaccaacaaatgctgtatactcagcctcagcagaaaggaaataattgcaattaaaaactcttgagtaatcctaatttgacctatgaaataatattttttcaagtgattatgaaaaataatccagagatgtttctcaacatcctacaactaacgggacagcccacactacagaaagttaagcagtaaaaatgttaacactagagaggttgaaaggctattctgtccagaatatgtccaacttcaatgtgtgtatgattcaattagggatcttgttcaaatgtagattctcatatggggcctctaggataggtccagacattctacatgtgtaatggtttccccgttgatgttgatgctccctgacctgttgggtggttcactctttgaggatcaaggctatggtccagtgttagagtcaattagtacttcgagatcttctccagcaagaatcctaccacacacctcatatttgacttcaggtggtcagtgttggactgggcaggtcagcttttgcataaataaagattgcatgtgcctcttgtgtgcttctctcatgaaagaaaatgaaacctttagaaattccatctactggctgggcgctgtggctcacgtctgtaatctcagcactttggaaggctgaggtgggtggatcacaaggtcaggagtttaagaccagcctggccaatatggtgaaacccagtctctattaaaaatacaaaaattagctgggcgtggtggcacgtgcctgtagtcccagctacctgggaggctgaggcaggagaatcacttgagctcaggaggcagaggttgcagtgagccaagatcgtgccactgcactccagcctgggtgacacagtgagactctgtctcaaaaaaaaattccatctacttatggagtttatgtgagaagtaagcaatattttgaagctcattggagattaccttgcacagagcagatgctcaatggatatgtcagctcttcttgactatgtctttagttcatcaaattactccttcaattcttgtaggaagtcttataagaactcctttaattcttcatagaacacttactttattgcaagtttatagcacatcattcattaacatttaatgtggacataagtatgaaattcttgcaagtctgtttctcatgccagtaaatttaatttttacttatttattaactcccctattgtctttgggaatattgtgtttctccacctttggctcggggctttgctaatacctcaattgggaggcatgtatatccctacagtggttgatgtggagcatagatatgtgatgtgctttgtctgaaagaatgtgcgcattcatgagaagtccaatgtctatgaagaagttgtaagaggccttgtgagtttccaccacttctcttgatcttcctctgtcaaactgtccttcctattcaaaattcaaaaactaactagatttggatagtcgcatggatggaatattttgtcctcttcaaaatccctatgtcctaatcccaatgaaaaactttcccaacataaactcctatgtgataaaaaagcaggacattaaaccgttgactaatgggatggcttattatgcagcagtagcttactgatacaataaacagtgcaaacagatctaaagacattcaaaatattctaatgcttcttagtttttaacattggttcttatatttgaggcagcattaatgattacctggatattgatgcttatgtcagataattgtattaaaacgagagtattgtttcctttttttctaggcagccaggaaagcttgcaaggacatatatgtttttgaaggaatgaattgtgaccttggttcacacaagtttctattcccagaggcaataataggcagaaatccaagttcatgtgtgtgtattcctttgatcgtgagagttgaagagagttcagagtataaaatatataaagcaactgctgataaatgaagcacacatattgttcacttatctgcactttaatgtttatgacacaatttttaaaggggaagatatttgttagtacaatggaaggagtcgtatttataggtagcactggaaaattttaagtaaaatgaggaagctaatacaataaaattatatggactatgacaccaaatctctcagatgcacaaacttcattacacatggacactaagcttgtatgcttcaaatgttccacagtaattccatatgtgactgaaagttttattctgtcatattgaaggtaattgctgagtcttaaggccagatgaagtcaatttatgtatgctcacttgtctttctgtttagtttacacttggaacatgtattttataagcaatttttaatcccagcactttgggaggccgaggtgggtgggtcacgaggtcaggagatcgagaccatcctggctaacacagtgaaacctcgtctgtactaaaaatacaaaaaattagccgggcgtagtggcgggcgcctgtagtcccagctactcgggaggctgaggcaggagaatgacgtgaacccgggaggtggagcttgcagtgagccaagatcacgccactgcactccagcctgggagacagagcgagactctgtctcaaaaatcaatcaaccaatcaataaaataaaaaaataaaaaataagcaatttttgtcctccttctttttaccagggaatatagagggcactgtagacaccaagcagaatagaagacaggatcctaaggaagagaataaaattccaggagtagctataaaacacactagtatattaaaatttacattgtgaggaggaccagttaaggcagtgacagagaaagaaataacaaatggaaaaatgaaaacctgtggtctcagctaggcatccacagtaaaattatattaatgaccttagagtggccattcttaattatttgggctaacacaactcattactgcatgagacggataggaatctccaccttgtttctgaccctagtctgggaataactttgcaaaagttggaaaatgacaaaggacaaaaaaactgttggctgtttgagagctgaaagcttttaaagaaaaggcatacattttacaaagcagttaagatcatacaaatcccaaaaaattaacagaaggaaccacttctgttttcacaatctgactaataaatcacaatgtttgggtctggggcttacagctctggaatcacagacccttcttgaaaaatggctcttttaaaaaaatttttttttttttaaattttgagacagagtctcactctgtctcccaggctggagtgcagtggcatgatctcagctcactgcaaccttgcctcatgggttcaagcgattctcctgcctcaacctcctgagtggctgggactacaggcgcatgccactacgcccagctaatttttgtatttttagtagagatgggggtttcaccatgttggccaggctggtcttgaactcctgacctcatgatctgcccacctctgcctcccaaagtgctgggattacaggcttgagccactgtgcccagccgaaaaatggctcttttattgtttccctctgaagaattgtgtcagagccccctttatgtctttattcctcagactgtaaatgaaggggttgagcatgggggtgaccacagtgtacatcaccgaggcgacagcagttgagtgtaagttttgggtcatagtagagctaaggtacacccctagccccgtaccataaaatatggagacaactgagaggtgagatgcacaggtggaaagtgccttgtacttcccctgagttgacgagattgcacgtatggaggaaactatcctacagtaagaataaaggatcccaacgagaggaccaccgtccagcagcacagctgcaaaatgcatcaccatgttgttcacaaaggtgtcagaacaggcaaggtggatcatctcattaagttcacagaaaaagtgagggatttccaagtctgtgcagaaggacaactgcaatgtcactaagctttgtaacatggagtttaggacactcatgatccaggacaccagaaccagcagtccacagagctgagggctcatgatgaccgtgtagtgcagggggtgacagatggccacaaactggtcataggccatcacggtcaggagtaagctgtccaacactataaagagtacaaaaaagcacatctgggtgatgcaacctgcataggtaatgactttgctctgtgtctggatgttcaccaacatctttgggaccatggtggaggcaaaacagatatctacgaaggacaggttggagagaaagaagtacatgggggtgtggaggcaggagtctgagattgcggccaggatgatgagcaggttcccgagcacagtgaccaggtacatggacaggaacagcccaaagaggaagggctgcaattcttgtttctctgaaaatcctagaagaagaaattctgaaatttgtgtctcattccctgctttcacctggttgatgtttctaccaaaaacaaacaaacaaacaaaaaaacacacaagaaagaacagaacatgagaaaaacatgcattacaaacttaccagaaatgctgtcatacatattctacagtgaagaagctacgttttattttattttttatttttatttttttgagttagagttttaatctttatgcccaggctggggtgcaatggcgtgatgctggctcactgcaacctccgcctcccaggttcaagcgattctcctatctcagcctcccaagtagctaggattacaggcgcacgccaccatgcctggctaatttttgtatttttagtcaagactgggtttcaccatgttggccaggaaggtctcaaactcctgaccttaggtgattcacccgcctcggcatcccaaactgctgggattacaagcatgggaagaagtagtatctaaggttatggtttcatattatataatgatataaggattccaatatttatgagaaaggtggtctttagtcagatgataaataatgatcaccaaatgatggtcaaaggtaatgcaacttctaagaagagatctaatacaaaaagccaaaaagcacaataaaaaataagagagaaaacaagttggaaatgcatgcataaaaggcaatttatttgtccaaatgttgcagaagaactttctacatttatgtagcaaggaggggagcacactatgatcaatggatttggctacacaatacttctaagctttcacacatttccctcaaatacattgaaagttacataacagtaataaaagacatatgccaaaattgatgaagaactccaagtcttatattttgataaatgaaataaaacaggattaaaaatattacaaacccattttacaaaaggaaagttcatgtacagtttgcaatagctgtaaatgtctaacaaatacacagatatatttagcttcactagtaaaaaaaagtggcaaagtttgttagtatttcactttttcacccattaaataagtttttgatttcatttgaatacttagcatgagagaagatactacaaaatgtatacctcatgactgctgttgtcaggtagtttttgaaaggaattcattggtctggatctttctcaccaatatggaaagacagtcaaatatgccccttcttaaaaacaaacaaacgaacagacaaacaaatccctctcttcagtgtatatctctccacaggtaattgacagagcaggagcaccatcatcttggacaaccgccactttaagttccagctccttttctaacctcatgcatcttaagaaaatcacttctcttctaacaacaagcagccagaaagagcagacagtaaaacacagataagacagctcgggcatagagggagggggaaagtctcttgggtaaccaccaaacctggcactcacacagtgggccccagaaaaacagtgggctctaataagcacattcctttccctttaggtgcactaagatagggaagctaaaagcagacttggggggtatgcctgcagctgcaagaagatgtacgggaacagacacaaaaactctctctccaggtaagcaagacaaagaggcacagaaacattccaagccggtgataagctctcccgccttgaacccttaaaaactcttagtctgtaagagagtgccttggctggcacagtggcttacatctgtaatcccagcactttgggaggctgaggcaagcagatcatgaggtcaggagtttgagaccagcctggtcaacatagtgaaaccctgtctctactaaaaatacaaaaaattagctgggcgtggtggcaggcacctgtagtcccagctacttgggaggtggaggcaggagaatcacttgaacttgggaggcagaggttgcagtgagctgagattgcaccactgcacttcagcccgggcaacagtgtgagactccgtctcaaaaaaaaaaaaaaaaaaaaagaaagagagtacctctgacctaactcagccagaagcccctctcaggtttgttctccaaaataaacctgtcttcaaccgttgagctgcttttcatgtttctttaactattacagtagtaccctatttttcatcttcacttaattgtaaagatccttgggcacggatgctacttttactggagccactttaatcatctcatttcctcttctaattgggcttctattactattacttcattgtcaacaatcatcctccaatgctgaattcaatgttcatgtctctttttagtatcctaagtaaatacctgaatcaattaattagtcaggcaagttagcaaacaaccacaacaatctctccactctagcactggttggtttggctctcaggtagccttaggttcacgttcacagctcccattctccctgaccctttcccgcagtacctactggactctttgacttaccttgactggttttctgaaagaaaagcctccatgtggaagtgtgaattcctccctgaatggttgttggtggagatggaagctctgtcccgagacaagacagtaggagaaaggaaagcatcggtgcccaagccagcagatttagactccaaaaaacacaagcatgtcccatccagcccaaggttgcatatgctaagtgacaacagccaagggggtacttacagatttgcacattaggtgcatttcctcttgttattccaaccctgagcagatcattttcctttgggattttaccctgctctgaattgattttttccctgtattctctattcccaagacaccatattaagcctgcagtgaatccagtctttattattccttctccatggacttgtttgccttccagagttctaacctcctaatgccttactctattcctcattcccgagggaaggttttctcctaagtctaaactaaggaacttgtcttaactatgttccttgcatctccaaggtattcacttgtgatgggaacacagcccttgatatctccagaattatcgctattttcctctttaacaagggggtgaactctgttctgatataaaaccgtgagtcctacatttcttgaaatcatgatgcttttgccaaaacaatgagaaattttgtacttcttaaaaaggttaagagctgtcatttaattcttcatgtataaaacatctggttactcttaagagatatatttggctcttttcatgcaagttgccctgagaatagcaccttctaaagattatttaatttaatttttcaaaatttatttatttaaattgacagataaaattgtatttatcacaaaaaacatcacattttgaggtatatatacattacagaatggttaggtctagctaatggatatatgttttacctcacatagttatcatttttgtagtgaaaacacttaacatccactctcttaacattttccagaaacaccatatatcatccttaaatataaaatcttcatgctatactatagatctgctgaacgtattttttctggctgcaattttgtatcctttgacaaacatttccccactcctcctcccacaacagctgtagcctctggtagccactgttctactctataattctatgagatcaacttttttatattccatatgattaagatcatgtgatatttgtgtttctgtgcctagaatatttcacttaacataatgctctctaggttctttcattttgttgcaaatcacagtatttccttcttacacagggctgtatagtattccattatgtacatatgccacattttaatatccattcatccactaaggtacacttagattgacttcatatcttggctattgtgacactgcaataaacaggaaagtgcagatatctgtttaatacactattgtcatttccattggataaatacctagtgggatccctgagtcgcattctatttttaactttttgaggaacgtacatactgttttccataatggctatactaatttacattccatgaacaatgtataagatttcccctttctccatatcgttgtcagcatttgttatttttcctgtcttttgataatagccctgttagctgggatgacgtggtatctcattgtggattcaatttgcatttccctgataattcgtgactttgagcacttttcatggaccattgtatacttgtatgtcttcttttgaaaaaagtgtcctcaggtcgttgcctatttattaatcagattattttttcccactattgagttttaaaatacattctagataaccatttttcagatgtttagtttggaaatattgtctctcattgtacagcttttctcttggatctgtcaattatctcctttgctgtgcagaagattttttagtttgatgtcatcccattcatctatttttacttttgtaatctatgcttttgaagttttattttgaaaaatctttaccttggctaattttatgaagcttatcccatgtattttcttctagtagtttcatagtttttggtattccatttaaatatttatttcatttaaagttaatttttgtatatagcaagaaaaggaatctagtttcctttttctgaatgtggatatccagttttcccagtagcattcattaaaaagactgtcctttcaccaatatgtgttcttggcacttttgtctaaaatcagttggctgtaaatatgtgtttatttatgggttttcgtctctgttcctttggcccatgtgtatgtttttatgccagcacgaagctggtttaggtacaatagcttcataatatagtttgaagtcagatagtgtgatgtctccagctttgttcttttggttcaacattgttttagccatgtagggtcttggatggttccatatgtattatacaattttttttgtatttctgtgaagaatgtcattggtattttgacagggattgcactgtgtcttttgatcactttgggtattatgggcattttgataatattgttatttagttatttatttactttttgagacaaagtctcactctgttgccagactgaaggccagtggcacgatccccactcactgcaacctccacctcccaggttcaagtgattcttgtgcctcagcctcctgagtagctgggacacaggcatccgccaccttgcctggatagtttttgtatttttagtagagatggggttttgccacgtttgccaggctggtctcaaactcctgacctcaggtgatctgcctgccttgccctccccaaatcctgggattataggcatgagccaccgcacctggccaattttgacaatattaatcaggaatacatgttctaccttcagtccttggcagagagcatgtattctaaagttttaatgagaaaatctttcatgcatttgaggaatataaagtggattttggcatattccaggcactgtccagaaaatgaatgtgtgatgttataaaacaaaagaagaaagaggtaagaaggagaatgtggatggagtgttattttttattgggtggtcaggtaagaccagtagacaaggtgacaactgaacagagaccacaatgaagacagggtggagtcaccatgttccttgcagaagcgtatgcaaggcagaaggaacgacaatgaaagaccctgaggcgtgttcttctttcagatgttcaagtccaacaagtaagccagtgtggcaggcaaacaagcaagaggagaggaatgagagatggtttcagaggatattgaggaaggagttggcctggaagctgctgaaacctgaagacacaaggagtccttctgtccagatgttgcatttgcactttattaatttggttgcaaaggcgccccatgaattgcaatgaacttcctctttgtttcctgctgtggccttgagttctgatgttcatatgatgagttatcttttggaatacatagcccaggttctctttgtctgaaacttctcaccctaaagaaacacacacacacacatacacacggaacacatatacacatctgacgttcatattttgtgttgtcatttggaatatgtaactcaggatctctttgtctgaaacttcttctcactctgaagcatcatacacacacacacacacataaacacacacacacacatagacacatacacacatatatacggaacacacatacacatctgctgtggcttcctgggtgcatgttactcccatgcccttctcaacaccaattacagcattagaaaggaaatggataccaggtaagatttgaataatgaaaatctaaaacaaacttatgaaagaaaagatatgaaataaattactgacgtgagtcagaaattcaaaattaaagtggcaaacatctgcaaataaatgctcaaccattgtggaagacagtgtggcaattcctcagagatctaaagacagaaatatccttcaacccagcaatcccattcctgggtatatacccataggaatataaatcattctattataaagacacatgcacacgtatagtcattgcaacactattcaaaatagcaaagacatggagtcaacctagatgcccatgaatgatagactggataaagaaaatgtggtacatatataccatggaatactatgcagccataaaaaagaacaagatcatgtcctttgcagcaacatggttggagttagaggccattatccttagcaaactaacacaggaacagaaaatcaaataccagatgttctcacttacaagtgggagctaaatcatgagaacacacggacacagagaagggaaaaacacactggggccaactggagggtggagggtgggaggagggagatcaggaaagataactaatgggtactaggcttaatacctgggtgatgaaataatctgtacaataaacccccatgacacgtgtttacctatgtaacaaaactgcacatgtacccctgaacttaaaagtaaaaaaattaaaatacgctttttttagcagtagaagaaacagtatttaaagccataatttcattcctatctaagtataaatggatccaaatatgcttacgaaaaagatcttaagttgaatgtaattttagtttgtattcaattgtaggttgtgagtgcaaaagagtatcttccacaagatggcagtagattactgctttaaaatatagatctgcatattctcatttatatgcagaatctaaataatcaaactcatagggatagagaggagtaaggcagtggttaccagggactggagtatggggtggggtggatgcagaaagcggagacattagataaaggatataaagttagcaagaatgggttctagtaatctattgcacagcatgatgactttagttgagaataatgtattatatatttccaaagtgctagtatcatagattttaaatgttctcaaccacaaagacatgataagtgtatgaagtgaccgatacattaattaggttcctttaatcattctacaatgaatacatataaaataacatcttatcctgtgttagtttgctgagaatgatggtttccagcttcatccatgtccctgcaaaggacatgaactcatccttttttatggctgcatagtattctatggtgtataggtgccacatttactttatccagtctaccattgacgggcatttgggttggttccaagtctttgctatcgtgaacagtgctgcaataaacatacgtgtgcatgtgtctttatagtagaatgatttataatcctttgggtatatacccagtaatgggattgctagaaaaccaaacactgcatgttctcactcacaagtgggagttgaacaatgagaacacacggacacaaggaggggaacatcacacaccggggcctgtcggtgggtggagggctagcggagggatagcctaatgcagatgatgacggcttgatgggtgcagcaaaccaccatggcacgtgtatacctatgtaacaaacctacgtgttctgcacatgtatcccagaacttgaagtataataaaaaataaaaatagaaataaaaataaaataacatcttactgcaccccacaagaatgcaatgatttttgtcaatcaaaacagaaattaaaacattaaattaaaaataaaaatagatctaattacaaaaggaagcaataagcaaaaacagatgtgaaataagatggaaatacttatgaaggatgatatatttctagcaatgatgcagaagaattttctaagtcaaaaaacaattggagaggtgggaacaaattatgacaaacagatttgagcacacaacgcttataaactttcacacattttcctgatatacacctctacatacataaaaattaaacattattcagcaaagttggtgaaaaagctacaatttcttgtttgaaagaatgcagtcaaaagaatgaaaacattcagacgtcagaacatgaaagcagggaacttgcataatttgcaatagagaaaataaaaagcaaacaaatccagcctcaccagaagaagaaaataattgcaagcaaaaactctttagtattctcattttgacctattgtataacatttatttttcatgtgaatatccaacatgaaagaagagactatgaaatgtatgtcttgtgaactgctgttgcaagatggaatttacaagtaatccattggtgtggatctttgcagttaagcacagaaacatgctcaaatacgcctctcttaaaatttgttccaaagtctctcaattcattgcacatcattccacaccaaatattctactatcctgcttctttcactgcaaaatttctagtatgtgttgtaatttactggaaccactttttgtcttccattccttcttcaatctcatccaaatcaacttcctttattatcacttagttgtcagcaatgatccctgcattgcttagtatgacaaacacttctctttttaacatattaactatattaaatataaattagtcaaccaggcaaacaaacacacatcaatctctcagcttgacttaggctagtttggctttcaggtaacactaggtaaatattcttgacttatattgcctctgaacattttctgcagtacctactgggcggactcacctgtatggggtctcagagaggaaggtctccatatggaagtctgagctcctccctggatgctgataatggagaatgaagctctgtccccagacaagacagtaagaagaagtgaaacatcagcaccttagccagacatatgtctacaaaccattcacatcacatccagtccgaagctgttacagtcttaaggacaatagcagatgaaatagatttttacaattccctgtatctatgcatcagacaaatttcccttttttcactccaatccatgagcacctaatcttttttcatctgttgacttttaaaaaagttatttaaatagttttttggggaacaggtattgtttggttacatgaataagttctttagtgatttcttttttttttttgagacagagtctcgctctgtcgcccaggctggagtgcagtggcgcgatctcagctctctgcaagctccacctcccgggttcacgccattcttccgcctcagcctccttagtagccgggactacaggcgcccaccaccacgctcggctaattttttgtatttttagtagagacggggtttcaccctgttagccaggatggtctcgatctcctgacctcgtgatctgcccgcctcggcctccaaaagtgcagggattacaggcatgagccaccgcgcccggcctttagtggtgatttctgagattttggtgcactcatcacctgagcagtgtacgctgtaccccatggatagtcttttattccccatccccctcccaccctttccccaagtccccaaaatccattgtatcattcttatgcctctgcatcctcgtagcttagctcccactcatgagtgagaacctatgatgtttggttttccattcctgagttacttcacttaaaataatggtcttcaatttccatccagattgctacgaatgccatcaattcatccttttcatggctgagtagtgtcccacggtgtgtgtgtgtatataacaatttctttagccactcattgtttggtgggcatttaggttggttccatatttttgcaattatgagttgcatgagcacctgatttttcgttggacacaggtctggaaaagaagaaacatttttctgctgattctgttccaaagagatcaggctagaagtcaggtgaatccagacttcattacttctctgtgaaatctcccacctgacgatggtctagcctccttagcacttttgctgaaacttgagttaaaattgtctccaaagattaagacgaagaatatgtcttcaccagggcccttggaaactcaacgtattgacttctggtaagaacatagttttattgacatctccagaaaattgcaattccctctccaacaatggagataatgtgttcatttgctataaaaccattgatagttagtataatccttggcttcctgatgctatcgacaaaacaattaggagtttcatgcttgtatacacaagaaagtgttgtcatttaatccttaatttatgaaacatttggctattgcaagagatataattacacattttatgcaccatggactgaagttggaatcttacatggtttgtctcatttaatgtcacatgtaatgtgtctcatttttgcacattcccatgctacgaggagcctctttctacatttgtagaattggggctaagaagggttaagtgatctgcccagtgttatgaactgagggaaggatgagctttgattggaactccatcaagatgtttctagttcttggctgcaggcggtggctcatcccagcactttgggaggccgaggtgggtggatcacgaggtcaggagctcgagaccagcctggccaatatggtgaaaccccatctctaataaaaatacaaaaaattagttgggcgtggtggcaggtgcctgtagtcccagctactcgggaggctgaggcaggagaatcgcttgaacccaggaggcagaggttgcagtgagccaagatcacaccactgcactccagcctgggtgacagagcgagacttggtctcaaaacaaaacaaaacaaaacaatacaatacaaaacaaaacaaaaaaaacggtttccagttctcacagtctcggtcagtggttctcaaccagggatgattgtccttccatgagacacttggaaatgtctggatacattttttgttgttgtcacctagggaggtgctactggaacctagtggattaaagccagggattgctgttcaacatctcacaatgcacagaacagtctacaccagaagtatccataaacatgttaaccttggagaggttgagagaatgttttggaaaagaatatactcaaattgaaagtttttataattcatttgggaccttgttcaaatgcagattctgatttgggacattgagggtaggcagaaacgttgtgcatttgtggctgtttccctgttgatggtgatgctgttcattctgttctgtgaagcactctttgaggatccagtgttagagtcaaagaaaactacttttaaacctttttcaccaagaatcgtaccacatacctcatgtctgcctttaggaggtcaaatgtttccctcagtggctcagcttctgcagaaacaagtttatacaagcctcttgagtacttccctcacagtaggataaaaaacttttagaaattccacccaccttgtagaatttatgtgagaagtaagtaacagttttttaaaattttactttaagttctgggatacatgtgcagaacatgcagatttgttacacataggtatacatgtgccatggtggtttgcagcacctatcaacccgtcatctaggttttaagccccgcatgcattaagtatttgtcctaatgctccccctcccctttcctccccaaccctgccaacagtccccagtgtatgatgttcccctccctgtgtccatgtgttcttactgttcaactcctacctatgagtgagaacatgtggtgtctggttttctgttcctgtgttagtttgctgaggatgatggtttccagtttcaggacataggcatggtccaagacttcatgactgaaacaacaaaagcaatggtaacaaaagccaaaatggacaaataggatctaattaaactaaagagcttctgcacagcaaaagaaactatcatcagattgaacaggcaacctacagaacaggagaacatttttgcaatctatccacctgacaaaggtctaatatccagagtctacaaggaacttaaacaaatttgcaagaaaaaaacaaataactccatcaaaaagtgggggaaggatatgaacagcaataacagtttaaagctcactggaaattccttggcacagaggagctgttcaatggagagcagctatagtgactaggttccaactccccatttcctaggctcatggtgacaccagaatggtgtttggggacaggaagtgagtctagcattgccctgctcctgggaggcagcaagttgtgatcatgaaggaggacttctacctaaggccctgtatagggagaagagaacttgagaggccatcattctatactttgttgaattcagggacatcatctgtgttactcttatgttccctccaaatagtcatattaaggaatttttagactctttcaagctgttctactatcttcttctcttaggaatatctataaagctgatgtttcttggtggatcatattaatcctctagctcttctgggaactcctccaagtcttcatagaaatcttatcttacttgttgaaagtctatagaatgtaattcataaacacttaatgttaacagaagtgcacaatatttgcatgtctgtttcacccccagatagataatttttattttttacttatttattgagtcctctattgtctttatgacaattgtcattctccatccttggctctgggtcttgatgatacctcatttgggaagaatctatgtccctgaaatggttgacattgagcttgaacataagactgctttttctatcaggatttgagcagtcatgagatgttcagtattaagaagaaataagagttattgtgagatcccaccacttctactgatcttcctctccattcaccatgtccaaaattgaaaaaacgaactagatttggatggtcctgtggactcaatgtttttgtctcctccagtattcatatgtattaatccttattataaaatcttctttagtatagctccctatgtggaaataaaagcatgtcattaaacctttttctattagtataccttgttatgcagcagtagcttaatgatacaatcaatgcaagcagaacaaaagaattcagaataatttaatgcctcttatttttggacatttgttctgatatttaaaggcagcattcatgtttatttcagataactgtataaaaaatgagactacctattagattcccttctagggagctagaatattttgaaagaacgtgtatgtatttgtagatataaattgtgattctgattcacaagtctctattctccaagccaatgctggttagaaattcaggttcctttgtgagtcatcatttgattataagggttgaagagagttagagtataaaagagacaaatgaactgatgataagttaaatacacacattgttcacttacctacattttaatggctaagacacaatattttaaaaggaagattttaagcaggacaacagaaggagtcttatttgtgtgtagcactgtaaatttttaagcagaaacagtaaaatgatataatgaaattacatagactgtgattccaaatccttcccttggactaacaaacctcattacaaatgggcaccaagcctctataagtagatgtatatcatcagatcaaatctcccaatgcaattcaatgtatgactgatttttttttttgagatggagtctctgtcacccaggctggagtgcagtggtgtgatctcagctcactgcaacctccacctcccaggttcaagtgattctcctgcctcagcctcctgagtagctgggattacaggcatgtgccaccatgcccggctaatttttgcatttttagtagagacagggtttcaccatgttggccagcctggtcttgaactcctgacttcaggtaatccacttgcctcagcctcccaaagttctgggattacaggcgtgagccaccatgccgggccaaaaattttactccatctttttttcttttatatttttgtgggtacatagtagatgtatatacttatggggtacatgagatgttttgatacaggcatgcgttatataataatcacatcatggtgaatggggtacccaccccattaagcatttattctttcagttatgaataaattttttaatccatattctttcaggtgtttttgtaatctaagtccagatgaaatcaattgattcacacaaatttatttttctgtgcagactacacttgaagtgtgaatttgataggcaatttttttttttttgagatggagtttcgctcttgttgcccagactggagggcaatgctgtgatctcggctcactgcaacctccgtctcccgggttcaaaccattctcctgcctcagtctcctgcgtagctgggattacaggcatgcgccaccacgcccagctaattttgtatttttggtagagacggggtttctccctgttggtcagcctggtctccaactccctacctcaggtgatccgcccgccttggcctcccaaagtgctgggattacaggcctgagccaccgtgcctgcacttgataggaaatttttaccttcttactctttccagggaattgagcaggcacggtggacactgaactgaatagaggacaggaccctaatgagtaggataaaatgccatgatgacagcactttggggggccgaggcaggcggatcccctgagggtaggagttcgagaccagcctggccaacatggtgaaaccccttccctactaaaaatacaaaaattagccgggcatggtggtacatgcctgtaatcccagctccttgggaggctgaggcaggagaattgcttgaacccaggaggcagaggttgcagtgagctgagatgatgccactgcacttcagcctgggtgacagagcgagactccatctaaaaaaataaatgccatgatgagctaaaatgcacactcgtgtggggtaaagtttacatgaccaggaagaacacttaaggtggtggtggagaaaggaataagctcaaagtgaaaaactgtcttctcagatatttatctaaaataaaattatattaatgaccttatggctgccaggtgcaattgattctgcaggactaatgcaacccacaagtgtaggagaaaaataggaatctccaccttgtttctgaccctagtttgggaaaaacattgggaaagtaggaaaatgacaaaaaaaaaaaaaaaaaaaagattggatatcagagagcggaaagctttataaaggaatacattaaattctatgtcagttgagatcaaagaaattgaaactctgagaaaaaatagaaggagcaaattccactttcacaacctgattcgtgaatcacaatttctgagtatgagacttaaagctctgaaatcacagttatttcttgaaaaatggcccttttattgctttcctctgaaggacattttcagagccctctttatgtctttattcctcagactgtagataaaggggttcagcatgggggtggccacagtgtacatcactgaggctgttgcacttgtgtgtgagttgtgggttgcagcagaagtaaggtacacacctaggcccgtacaacaaaataaagagacaactgagaggtgtgatgcacaggtggaaaatgccttgtacttcccctgagctgatgagattgcacgtatggaggaaactatcttagagtaagagcaaaggatccccacaaggggaccaccagccagcagccctgctgcaaaatacatccccatgtcattaagaaaggtgtcagaacaggcaaggtggatgacctgattaagttcacagaaaaagtgggggatttccaagtctgtgcagaaggacagccacaataccattaagctttgtgacaaggaattcagggcagcaatcatccaggatgccagaaccaggagtccacagagccgagggttcatgatgactgtgtagtgcagaggatgacagatggccacaaaccgatcataggccatcacagccaggagtaagctgtctaaccctccaaaaagtacaaaaaagcacatctgggtgatgcagcctgcataggtgatgactctgctctgtgtctggatgttaatgagcatctttgggattgtagtggagatgaaacagatgtctgcaaaggacaggttggagaggaagaagtacatgggggtgtggaggtgggagtctgagattgtggccaggatgatgagcagattcccgagcacagtgaccaggtacatggacagaaacagcccaaagaggaagggctgcaattctggttcctcagaaagtcccagaagaacaaattctgaaatccctgtgtcattctctggttccatctttttttttctatttatttatttatttatttatttatttatttatttattaacatagacagggtctctcactctgttgccaacgctggtctgaacctcctggactcatgcgatcctcccacttcagcctacaaaagtgctgagattataggcataagccattgtgcccaggcttggttgcatcttttcaatgtgactaccaaaaagagagagaatatgacaatgtaattatgcattacaaacctatcagaaattctctcatttatactccggagtcaagaacttatttttcctttaaaaattatttatttctatggtgacagataaaatggtatgcatttatcatgtataacatcacatgtggaagtatatttacattgtggattggctaaatctagccaattaacattagtattacctcatatagtcatcattcttgtggcgagaacacttaacatccattttcttggcattttccaataattcaatatatcatcatgaactatattcaccatgctgtaaaataaatattttgaagttattccttctatctaattatcatcttgtatcccttgactgacatcacctcaagcctccataccaattgccctggcctctagtaatctccattctacaagaagctgttttctatgttttgtgtgtaaatctggtccctgttagaagatctccttgccatctctgattaggaattcctagaccacgctctctcgctctctctctctctctctctcagcctttccctgagggcatgtattctacagtatcattaaagagaaaaatcattcatgcatttgtggaataaaaaatgagttgatgttcagggtactgtatagataatgagtcaatggtgctataaaacagagtccctacaatcaaataacgggaacaaatacatatatactatgtcagttggtgattagtcctatgaataaaaaggataaaaagtgttacttttaataggtgtacagacaagatcagcagacaagctaaaaactgaacagagagcagaatgaagacagggcgagagtcatcatgtcccttgctggagtctgtgcaaggggaaggaaggctcagtggaagacttcacagaatgtgcttctttcagatgttcaaggtgctcaaggaagccagtgtgtcaggggaatgtacaggaagagagtgatgagagatggtttcagaagatgttgtgggatgaggtggccttgaagctgctgaaacttaaagacacaaggagtccgtctgaccagatgctgttgcatttgcattttattaatttgcctgcgaaggcatctcagtatgtgtaatgcatcccctctttttttcccgccgtgtctttgacttctggcttttctattatgagataccttttggaatacagagcccaaatcccctttctctgcaacctgcttttatgctaaaggtgcgtgcgcgcacgcacacacacacacattgcctacatgcacgcagcacactgtagctccctggagccatgttactcttgtgcttttctcaccctggttacactgttagaaagaaacgaataccaggcaagttgtcaatttcaaattatctttccccacgagaattcagaaatggtctgatagcatgtgagacagccttctcatttctcttctttaattattcatgtggcatctcttctttaattattcagggtctttgggatttgaactctttttgacagtcctatggaattgcactagttctggttctggtcttcctgtaacatgcaatgtccttcctagaccatactattgaatcctggctgggcaccgtggctcacgcctctaattccagcactttgggaggctgaggtgggtagatcaattgtggtcaggagttcgagaccagcctggcctatgtggcgaagccccgtctgtactaaaaatacaaaaattagccaggtgtggaggcaggtggctgtaatcccagctactcggggggctgaggtaggagaatcgcttgaacctgggaggcggaggttgcagtgagctgagattgtgccattgcactccagcctgggcaacaagagcgaaactctgtctcaaaaaaagaaaaaaaaaaagaaaaaaatcctgcacacactatgataactgtctccttttctgcagaatgaaattctccatatgatttcatccttgaggacattgtgtcatagacacatttgttacattttactttgtcttctctgttataatgcatgagtcaaatgagcaggaacttccctgctttaagtttgtattttcacaaaggtgtatgagtatgtctgtattatgtagaaaaaaattaaagcaatgagacgtgataaaataaaaagaatgttatgggattaaagccagggtaaatgtagtgatttccaaacaactatattttttaaatgttatggtacataaaacgttaaccaagccaagataaacaataagaataatttaatgatatcaaatgatttagtttattggcaaagacctagacataaaattatataatacacaatgtttctaaaatgttctggcacatagaagatactctcgacttattgaataagtcaggaagtaagtcctagtatatatgggtattaaaatatgacaagattgcaatccaatttagttgcaaaagaccagattgttgaataaaagcagaaataaatagctatctacctgggagaaaatgaagtgtgtctcccgactcacattttacaaagaattagcagatttaaagacctcagtgtaaaagtcagcaatatatgttagacgaatacatagataactacatataagatcttagtgtagacaaagtattttaactaacgcaagaaaaaaaactaagaaagtagacatatttttaggtaaataaaagttaaaactttttatgaccaaaaatgtttccttaaatatttcattaacagtcaatgaggagggcaatataattggatcacagctgtaatcccagtgctttgggaggctgagtagggaggtcacctgaagccaggattttgagaacagccggggcatcatagtgagaaccaggctctaaaaagtaaaccaaaaaagttaacgatcccaaagaaatacaaactcccatcagagaatactataaacacctctatgcaaataagctagaaaatctagaagaaatggataaattcctggacacatacaccctctcaagactaaaccaggaagaagtcaaatccctaaatagaccaataacaagttctgaaattgaggcagtaattaatagcctaccaaccaaaaagaggcccaggaccagtcagtttcacagctgaattctgccggaggtacagagaggacctggtatcactccttctgaaacgatttcaaacaatggaaaaagagggactcctccccagctcaatttatgaggccagcatcatcctgataccaaaacctggcagagacacaacaaaaaaagagaaaatttcaggccaatatccctgatgaacatcaatgtgaaaatcctcagtaaaatactggcaaactgaatccagcagcacatcaaaaagcttatccagcatcatcaagtcggcttcatccctgggatgccaggctggttcaacatatgcaaatcaataaatgtaatccatcacataaatagaaccaatgacaaaaactacatgattatctcaatagatgcagaaaagtcctccgataaaattcaactccccttcatgctaaaaactctcagtaaactaggtattgatggaacataactcaaaataatcagagctatttatgacatacccacagccaatatcatactgaataggcaaaagctggaagcattccctttgaaaactggcacaagacaagtgtgccctctctcaccactcctattcaacatagtgttggaagttctggccagggcaatcaggcaagagaaggaagtaaagggtattcaaatacaaagagaggaagtcaaattgtctctgtttgcagatgacatgattgtatatttaggaaaccccatcgtctcagcccaaaatctccttaagctgataagcaacttcagcaaaatctcaggatacaaaatcaatgtgcaaaaatcacaagcattcctatacagcaataatagacagagagccaaatcatgagtgaactcccattcacaattgctacaaagagaataaaatacctaggaatataacctacaagggatgtgaaggacttcttcaaggagaactacaaaccacagctcaaggaaataagagaggacacaaacaaatggaaaaacattccatgctcatggaaaggaagaatcaatatcttgaaaatggccatactgcccaaagtaatttatagattcaatgctatccccatcaagctaacattgactttctttacagagttacaaaaactactttaaatttcatatagaaccaaaaaatagcccgtatagccaagacatttctaagcaaaaggaacaaagctggaggaaatgattggctctcaggtgacctcaggttaatattcacggctcttgttcttcctgacctttcctacagtacccactgggctctgggacttaccctactgagttttctgaaaggaaggtctccatggagaagtgtaaattcctctctagcaggttgatggtggagatggaatctctgtctcaagacaaggcatcaggaaaagttgaagcatcatctatacttgagccagactaaggactccaaatgaaaccaccatgtcatttccagcccaaggttgcatatgctgagggactgcagcagaggagatatttatggcttcgtatatctgctgattagatacctttcctcctgttattccaactctgaacacatcagtttcctgggggacgttgccctgcactgaaacaaatgtcattgttgttttttttttctgtatcgtctattcccaagacactatgttaaaagtgaggtgtatccaggctttattactccttccccgtggacttccttggcttccagagtcccattctcctagcaccttctcccagccttcagtgaaaatttcctccaaagtctaaactgaggaacctgtcttgactaggtcccttgagtctccaaagcactggcttgtgatggaaactcagctcttgacatatccagaaaatggcaatttacctttgcaaggagatgaactgtgttctgttcatataaaaccatgggtactacatttcttggcttcatgttgcttttgccaaaacattagaatttcatatatatatttttttgagatggagtcttgttgtatcacctgagctggagtgcaaaaacattagccgggtgtggtggcagttgcctgtaatcccagctatgcaggaggctgaggcaggagaattgcttgaacccgggaggtggaggttgcagtgagccaatatggcgccatttctctccagcctgggtaataagaacaaaactccatctcactaaaaaaaaaaaaaaaagtgttagaacaggcaagcaggatcaactgattaagttcacagaaaaaaatggggggatttccaagtttgtgcagaaggacagctgcaacacattctgctttgcagtgaggaattcagggcactcatgctccaggacaccagaacccacagtccaaagatcccaggattcatgatgaccctgtagtgcagggggtgacagatggccacaaagtggtcataggccatcacagtctgcagaaatacattcatccctgcaaagagtaggaaaagtttgtgattctggaaaagtttcttgggaaaggacatgccttgcttctcggagacagaaatttgtgatcatgaagggacacctgcttccaggggtccacacggggaggagattgcatgagtgtccttccacgtctgctttattatactcagggacatcttctctgtcctcctctgcctggctccaaaaattcacattaaaaatgtttagactccttttattttattttatgttctggggtacatatgcaggatgtgcaggtttgctacataggtaaacgtgtgccatggtggtttgctgcacctatcaatccatcacctaggtattaagccccacaggcattagctagttttcctaaggttctccctcccccccaccccaccccccaacagggctcagtgtgtgttgttcccctccttatgtctatatgttctcattgatcaggtcccacttataagtgagtgcatgtggtatttgattttctgtttctgcgttagtttgctgagggtaatggcttccagcttcatccacgttcctgcaaaagacatgaacttgttcctttttatggctgcatagtatttcatggggtatatgtaccacattttctttatccagtctatcactggtgggcatttgggttgattctatgtctttgacatgaacagacacttctcaaaagaagacattcctgtggccaacaaacatatgaaaaaaagctcaatatcattgatcattatagaaatgcaaatcaaaaccacaatgagataccatctcatgccagtcagaatggcaatgattaaaaagtcaagaaacagatgctggcaaggttgcagagaaataagaatgtttttacactgttagtgggaatgcaaattagttcaaccagtgtggaagacagtgtagtgattcctcaaagatctagaaccagaaataccatttgatccagcaatgccactactgggtaaatatccaaaggaatagaaatcattctattaccaagatacatgcatgagtatgttcatttttagactcttataacctgctctgctatcttttaatcttgggaatatctgtaattctgataattcttgttgcgtcaatttatttctccagctcttctggaaactccaactattaatagaaatcttatcttcctcattgccagagtatagcatgtggtaaaaatacaaaaatagacatggagaaaactgtagataaaatttatacacatttaatttcaacagaagtatgaaagactttcatgtctgtagggaccagccctacagggtctgtgggtttttctcctcgtgtgtggagacaatagattgtagaaataaagagacaagacaaagagaagaaaagacagctgggcctgggggaacactaccaccaagatgcggagactggtagtggtcccgaatgcctggctgcactgttttttattggatacaaggcaaaaagggcagggtaaggagtgtgagtcatctccagtgattgataaggtcacatgagtcacgtgtccaccggacagagggcccttccctgtttggcagtcagggcagagagagagagagagagagagagccattatttcttctatgcatttcaaagacttttagtattttcactaattctgttattgctatctagaaggcagagccaggtgtacagggtggaacatgaaagtgaaacacgggcatgaccgctgaagcacagcatcacagggagacaggcctccggatggctgccggcgggcctgactgatgtcaggccttccacaagaggtggtggagcagagtcttctctaactcccccggggaaagggagactccctctcccggtctgctaagtaatgggtgccttccctagacactgatgctaccgctaggccaaggagccctctagtggccctatctgggcgtgacagagggctcacactcttgtcttctggtcacttctcaccatgccccttcagctcctatctctgtatggcctggtttttcctaggttataattgtagagcaaagattattataatattggaataaagagtaatgtacaaactaatgattaatgatattcatatataatgatatctataatctacttctagtataactattcttattttatatattttctttattatattggaacagcttgtgccctcggtctcttgccttggcacctgggtggctagcagcccacacatgtctgtttctccctcaggtagatcattttatttttcattcatttattacctcccctattgtctataggtggatggtgcttttccacctttggctctgggtcttgacaataattcacttgggaggagtgtgtatccctaaaacggttgatgcacatcttgaacatgtgacatgatttgtctaacagactgtgagcagtcatgacatatttaatgcctgtgaagaaactgtaagaggcactgtgagattccaccacttctcttaatcttcctctctcaaagtgtccttgctatccaaaattcaagaaccaactagatttgggcagtcctatgaactgaatatttttatttccttaaaaaacgcttaagttctaattcccaatgtaaaaacttctctatcataaactcctacaggatgaaaaagcatgatattaaaccatttattattgagatggcttgttacacagcagtagcttactgatacattaatcaatgcaaacagaactagtgacattcagaataatcttctgcctcttcttttttcacagttgttctgatatttcaagaaaacatttgtgatcacctggttactcgtgtttatttcagataactgtattaaagtgaggcaacttttagattgccttcgggataaccaggagaagttgaaaggacatataggtttttgcagggataaattgtgactctaattcacaagtgtctattgacagaggcaatattgggcagaaattcaatgtcttgtgtgagtcattatttgaccatgaggaccaaagagactattaaaggaacaaagcaaattatgataaatttaatacacatattgttcacttacctacactttaatgcttatgagacagtttttaaaggaggagatatttttagaataatgcaaggagtcatattcgtagggagcagtagaaaattttaagaggaaaagcaagatggtacattgaaataatacagaccatgacaccaaatccttcactcagatgaagaaacctgattacacatggacaccaaatctccacacttccaggaccagatgtacatcatcaaaaacaaatattctatagtcattcagtgcatgactgatcattttattccatcacatttaacatcatctgtgactaaggatgtatgaggtcaactgacacataaaaatgtgcctttctttgtaaactgtatctaaaacatgtatttgataagctgtattttcctacctactctttatctttatcagaaaatataggcactgttgacgttgagctgaaatagagcataggaccccagtgaggcgagtaaaatcccttgcctagctgtaaaacacactagtattgaaaggagttagttagcttgccttaggtagatagcaagataaggattcctggagagcctttgactcatgggtcagtgcctcatctccatataatataaaaaaaaagcctggggaaaaaaaatgaagctgccggcaccaataagggaagaagcataggggattgtgtctggagacatgcccacggctgcacagataggaaaactcctggctcatttagataaaaactttcacaaacctctggctcactcagataagaaacaaggcctggcatagaaatgcctttgtcctttgtatagtcagtggcctcccaggaaaaagctttttctcccttcgtgggcatggacgcagtgggctctggtgggttccggtgggcactctacttcccttgttttggactataagtctggtctctatgaattcagcccctgattgatcctgggcaaaggtcctgggccaagctttctgaaaggtcccaggccaagatcctgagccaagctgagtcagcgttctccaagacagcctgcagactaaacacattgcttcccctttccagtccataaaaacctcagaacgggcctcatagggggcttcccattcaggaccccctctctgctggccgagagctttcttcttttccctccaacctcatctttgtgtccacgctccttaatgttcttggaggtaggacgaagaactctgggttttatctcaggcgagagactgttacatgttggtgcattgctaagacctcagcagtatgttcaagttgacattttcaggaagaacagctaaggttttcatagaaaaggaaataacagactcagaaatagaaaactgtgggctcagatattcatctaccataaaattatattaatgaccttacagttgccaagcgtagttaattctttgggatgaatataactcacccctgtatgagaaaaacttccatttgtttctggacctagtttggatgtaattttagaaaaatgacagaggacaaaaacagttgcatatcagagcagaaagctttattaagaaaaagtgtaaattttctaatgtcgtcaaggttaaagaaatctaaagtccagaatataaatactaggagaaaattctactttcacaatctgatccatgaatcataatttctggctaggggatttagagctctgaaatctcaagaacttctggaaaatggccctcctgtttctgctctctgaagaatcgattcagagctctgtttatgtctttattcctcaggctgtagatgaaggggttcagcatggaggtgaccacagtgtacatcaccgaggctgcagcatttgagagtgagttatgggttgcagcagaactaaggtacacacctacgcctgtacaataaaataaggagacaactgagaggtgagatgcacaggtggaaagtgctttattcatcccctgagctgatgagatcgaacatatgcaacaaagtatcttaaagtaagtaaaatattccagcgaggcatcccccacccagcagcacacttgtaaaattcatcatcatgtcattaataaaagtgtcggaacaggcaaggtggatgacctgattaagttcacagaaaaaatgagggattttcaattctgtacagaaggacagctgcaatgccattatgctttgtaacagagaatataggatgctcacgatccaggacaccagaaccagcagtccacagagccaggagttcataatgactgtgtagtgcagggggtgacagatggccacaaaccggtcataggccatcacagtcaggagtaagctgtccaacactacaaagagtataaaaaagcacatctgggtgatgcagtctgcataggtgatgactctgctctgtgtctggatgttcaccagcatctttgggacagtggtagacacaaaacagatgtctgcaaaggacaggttggagaggaagaagtacatgggggtgtggaggtgggagtctgagattgtggccaggatgatgagcaggttcccgagcacggtgaccaggtacatggacagaaatagcccaaagaggaagggctgcaattctggttcctctgaaagtcccaggagaaggaattgtgaaatttgtgtctcattccctggtttcatcttgttgatgtgacttccaaaagagagagaaagagaacatgacacaagcatgcattacaaacatatcagaaatattctcacttatattctacagtcaagaagttaatatgggctggctgcagtggctcacgcctgtaatctcatcactcgcggaggccaaggtggacggatcacctgaagtcaggagttcgagaccagcctggccaacatggcaaaaaccggtctcagctaaaaatacaaaaaaaattagccgggcgtgctggcgcatgcctgtaatcccagctacttgggaggctaaggcatgagaatcacttgaacccaggaggtggagattgtagtgagccgagatcatgccactgcactccagcctgggcaacagagtgagaccctgtctttaaaaaataataataaaataaaataataaataaataaataacttcctacaatttaatgatgaatgaaaaatacaagtatgtttttaaaatgccatcctcaatatcagatggtgatgcatcctatgaagaaggaggttagaaggaaagagtggatggggtaatagattttccagggtgttcaggcaggaccagcagagaaggtgacaaatgaagagagcccataatgaagacagggtggagggcactacgttccctgcagaagtttgtgcaatggagcaaaatgatcaatgaaagaccccgaggaatgtgcttctttcagatatttgaggactgcgaagaagacagtgtggccggggaatgagcaagaggcgagggctgtcggaggatgttagggaaggaagtgtcctcatagctgctgaaatttgaagacacaaagagtccctctgtccagatactgatgcctttaatttggctgcaaaggtgtttcatgaactgcaatgcatgctcattctgtttactgatattttcctgagatgtggcctttatctgatgggttaccttttgaaatatagagatcaggttccctatctctgaaacctgtgctcactctaaagttgtgcacccacacacgtgcacacacacacagagaacgcacccacacaggcagccatggcttcctggggccatgttaccccctcacgcttctcatcccactcacagtattagaaaggaatggataccaggcaagctgttaatatcaaattatctttccccaagaagatacagatatggtacctagaatttccagtttgaaaacttctcatgcatatggaacctcgagcgccactgcactccagcctgcgtgacaaagcgagactctgtctcaaaaacaaacaaacaaacaaaaaaccgagaggcagagagagaaaatcgattggaactgaagggaaaaataatctaataagctcacatagtccctcagagaccttaaggaagaaaaggcttccttagttttgaaaacattccaactcctcttatatccctgaggcccagcaaaaatcagaaaagacaaagggaaatttaccaaatatcaaacatggtgatatcttttctgtgtcaagatactgatagattgagaatccccatggaaaaaaaaatgagcaaatgataaaaatcaactattcaaaaaggaaatacaaaaggaacttctgggccagcttatttattgtgctggggtctgtcctgtgcattgtacgatgtttatcagcttccctgttctctactgaccctccccagggtgacagccaacccagtcattgctcaatgtcccctgggagacaaaaccacccctgggtaagaaccgatttttaacataaaaatcacaaaatatttccataccttttatcaactgagaaaggacaagggaagatgagccttaaaacaaacaaacaaacaaaaaaacctatagtcaaatataaaaagcacatgtgttatgcataacatactactcaacctttgtataaacctttgtgtaaagagaaggtttatgaggaactaaaatcttatggagaatagaatataagtgaggatgctattaggttaagaacagttatttcattttatggctgcatagtattccatggtgtatgtcctttgcagggacatcaataaagccagaaaccattatcctcagcaaactaacataggaacagaaaaccaaccaccacacattctcacttatcagtgggagctgaacaatgagaatgcatggacacatggaggggaacaacacacactgaggtctgctggcggggggggtggtgggagggagagcattaggaaaaatacctaatgtatgctgagcttgatacctaggtgatgggttcataggtgcagcaaaccatcatggcatacgtttactacctaacaaacctgcacatcctgcacatgtaccccagaactaaaaattaaaattaaaaaagaatagttatttcaaaacagctgcatgaatcaacatagaaagaaagtctgaaaaatccttatagaaaaatatgacagtaataatttactgacataaagatgcaccactaattcactgtgaaatcgcctcttggaaattgaagaatatcacaggaaaatgtttaaaatgtggggaggaaacagtatctaaggttataatttcgtattatataaacatataaagcttcaaatgtttaggggagatagatgtgaggtttaatcagatgataagcagccagattaggactccaaaaggaaagcatgtcccatcaagcccaaggtagcatgtgctgaggaacagtagcaggggagaaatttacagctttgtgtacctgctcatcaggcaaacttcctcctgttactccagccttgagcacatcgtgtccctatgagacattgctctgcgtggaacttttttatttttcttgcattttctgtatccaaggcaccagattaaaagagaggtgaatccagttttattacttcttcactatggacctgcttgccttccagaaatgtaatctgttaacactgtatcccaaccctgggggaaggtttttctccacagtctaaactgaggagcctgtctttgattagatcccttggatctgcagagcattgactgtgatgggaacacagacattgatatctccagagaatgactcttcccctcttcagcaagggagtgaactgtgttctcttgatagaaaaccatgagttctgtattgcttggcttcatgattcctttggcaaaataatgtaattttgcatacttccttaaccatacatctttacctacacaaaaaaattaaatgttattcagtaaagttagcaggaaaaaaaatcttccaatccattgtttgaaagaatgcaatcaacataatagtataaaaaacctcagaaaccagaatataaaagcatagaacgtgcacaatttgcaatggagaaaatgaaagctactaaaccctcaggtagagtatactcagactcaacagaaagcgaggcttaaaacttagatgacaggttgatacgtgcagcaaaccaccatggcacatgtatacctctgtaacaaacctgcatgttcagcacatgtatcccagaacttaaagtaaaataaataaatacataaataagaaagtctttgcgatagtttgctgagaatgatggtttccagcttcatccatgtccctacaaaggacatgaactcatcattttttatggctgcatagtattccatggtgtgtatgtgccacattttcttaatccagtctatcattgttggacatttggcttggttccaagtctttgctattgtgaatagtgccacaataaacatacatgtgcacatgtctttatagcagcatgatttataatcctttgggtatatacccagtaatgggatggctgggtcaaatggtatttctagttctagatccctaaggaatcgccacaccgacttccactattgcaaggacaaaaacccaaacacctcatgttctcactcataggtgggaactgaacaatgagaacacatggacacaggaaggggaacatcacacaccggggactgttgttgggtgggggtggggggcggggagagcattaggagatatacctaatgctaaatgacgagttaatgggtgcagcacaccaacatggcacatgtatacatatgtaacaaacctacacgttgtgcacatgtaccctaaaacttaaagtataataataaaaaaaaagcagaaaaaaaagaaagtcatggcaagtaaaaactctttagtgttcccattttgacgataaaataacatttattttattcaggtgaatatttagcaagagagagaagatactgtgaaatgtctgtcttgtgaactactgttgcaaggtagtatttgtaagcagcccgttggtctagatctttctaatgaatacagaaacatgctccaatacactcatcttaattttaaaaataaaccctcaattcattgcacatccacccacacctaatattctacattctactctcctacttctttttttgtgtgtttgtttgtttttgagacagagtttctctgttgtgcccacggcatgatctcagctaactgcaacctccacctcctgggttcaagcgattctcctgcctcagcctttcaagtagctgggactacaggtgtgtgtcaccacacccagccaattttgtatttttagtagaagatggggtttcaccatgttggtcagattggtctcgaactcctgacctcaggtgatccgcctgcctcgacctcccaaactgctgggattacaggtgtgggtcaccgtgcctggcccctttcctacttctttaactgcaaacctcctaggttctaacttcactggaaccactttatgtcttccattccttcttcaatctcatccaattgaacctccatatccctcaattaattgtcaacaacaatccctgcattgctgagtcttacagacacattttaacatataaaataaataaattataaattagtcaaccaggcaaacaaacacacatgaatctctcacctggcttgatactaggtgacctcaggtaaacattcttggcttccattctctttgaacatttcctgcagtactttctggggtctcagacgcacctgtatggggtctcagagatgaaggtctctgtgtggaagttgaaattcctccctgggtagttgatgatgcagactgaagctctgtctccagacagacagaagggaagagttaagcatcagccacacagccagacttaggactacaaaagaatcaaccacatcccatccagcccagggttgtctaatcccagagacaatagcagatgaaatatttacagctcctaatatctgctagcgagatatatttccctgttgctactctaagcctggagcacctgatttccctgtggaacactgatgtggaaagaaagaacaatttcctgctgattctctgttcccaagagaatcaagttagaagtcatgtgaatccagtcttcattactccttctctttgaactctgtaccttccagaggtctaagtgccattgcaccttttcacagccctcaattaaaatgttatccaaagtgtaaggctgagtacatggtctttactagatcccttggatattcaaatcattgacttgtggttggaacacagctgccgacatctccagaccaacgctctttcctcatcaaaagggagagaactgtgtttatttgtcataaagccacgggtatttactacagtccttggcttcctgatgcttttgacaaagcaatgagcagtttcttgcttgtaaacacacaagcatcaaagtacaacttatcattcagtccttcctttataaaacatttggtaatcataagagatatacttaaacctttgtagacatcatggaataagttaaaatcttatatggtttgtctcatttaatatcacatgtaatgtgtctcatttttatacatctttgttctatgaggtccaacgattagacgcctctttctgcacttttaggattttggttaaggtgagttagtgacctgcccaaagttatgaaccaagtaagggaagggatttgatcagaatgccatccaaatgtttccagttgtcacatctaggttactgacttttcttttctttacttttttcttttctattttctttcttttttttttttttttgagacagagtttcactcttgtcacccaggctggagtgcaatggtgcgatctctgctcactgaaatctctgcctcctgggttaaagtagttttcctgcctcagcctccagggtagctaggattacaggcatgtgccaccatgcctgggtaatttttgtatttttagaagagacagggtttcaccatgttgggtagactggtctccaactcctgacctcaaatgatccacccacctcagcctcccaaagcgctaggactacaggcatgagccaccgtaccgggccaggttgctgattttcaaccaggggtgtttgtgctccaggaatattaggaaatgtttggatacacttttggttgtcacatgtggggaagtgctacttactggcacattgtagattgaagccggggaagctgcccaacaacctacaatgcacaggacagcccacagcagaaagaattaatgcaaacaaatgtggacactggggaggctgagactattccagtccagaacttccctaatttcactgtatatatgaatcacctagggttcttgttcaaatgtcgattctaatttcagacatctaggactggtcccaacattttatacttttgacagttttcctgttggtgttgatgctattcatcctgttctgcggaacactctttggggatcgaggctgtggtcagtgttaaaggcaggtatacatattttgaggctttttctaccaagaatcctaccctgctcctcatgtctggtttaggaggtcaaatgttggactcggtagctcagcttttgcataatcgagtttacttacgcgtaagtcttgaacacttacggaatgacaggaaatgaaacttctagaagttccacttaccttatgaagtttaggtgagaaggagtaagacttcaaagcccattggaagttacttggcgcagagcaggtgttcaatggatagcagatatttggaccatgtcctagtttcccagttactctgctcattgtgacaccagaaaggtttcttgctacagtctagcactgtcctgctttgaggagacagcaagttgtgatcatgaagggagacctccttccagggccctgcacaaggaggagagtgcctgagagtctatcattctatgctttgttgacataaaatcattcatcattgtctctgtcaccctcatgctggctccaaatactcacagtagatatgtctgactctttaactatcttctacttttgagaatatctgtaaagctgatgtttcttagtgtatcaaattatccacctaatcttctaggagctcctccaactcttcatggaaatcttatcttcctggcttctaggtgatagcatgtaattcatacatatttaatgtatactgaagtataaaatgcttgcatgtctgtttttctcccagtagataattattttccacttatttattaactcttagataattagacacctctttctgtatttttgtgttgcctttctatgttgcctttaggaggatcagtcttctccacctttggctctggattttgatgatgcctcaactgggagaagtgtaacacctacgatgattgagacattctttgtctgataggatgtgagtggtcatgagatgttcaatctgtgagaagaagctgtaagaggcattgtgagatgacaccacttctgttgctcttcctctttcaaattgtccttgctctattatttaaaagtccaataataacaaatgctggtgagagtctggagaaaaggaaatacttccacactgcttttgggaatgtagattagttcagccattgtggaaagcagtttcacagttctcaaagaccttaaaacaggattaccacttcactcagaaattctattattggatatatacccaaaggaatgtaaatcattctactataaagacatatgcatacatatgttcatcacagcactattcacaatagcaaagacatggaatcaacctgaatgtccatcaatagtagaccgaataaagaagatgtggtactatacaacatagaatactacagagtcatcaaaaagaatgagactgtgtcctttgcaacaacgtggttggagctggaggccataattcttagcaaactaacgtaggaacagaaaaccaaataccacatattctcatttacaagtgggagctaaataatgagaacacatggacacaaagaggggaacaacagatactggggcctccttgagtgttgagggtggtaggagggttaggataaaaaaaactatgtatcaggtatgcttattaagcgggtgacaaaatactctgtacaccaaaccctcacaacaaacagttggcttatatagcaaacctgcacatgtacccctgaacctaaaataaaagttaaaaaaagattgtccttactgcccaacattcaagagctaattaagcttggatagtcctatggctgaatatttttgtcttgtccaggatatatatgtcctaatccccaatgagaaaacttccacaatgtagactctgatgtgattttttaaaagcatgactttaaatcatttattattgggatgttttgttacacaacattagattactgatacaataatcaaagcaacataactaaagatattcagaattatctttttttaggtgtcagatccttttgttttttagttttttattggattcactgtatacagaatattctgttggctctttttttttggtgctttttctgatatcagaaagcagtgttcataattatatggatatttatatttacttcacataactgtatcataggatgactacttttagatttcctctaggtaaccagaagagtttggcaggacatgtatatttttgctgaaacaaattgcaacctggaatctcaagtctctaatctcacatgcaatactgggaagaaattcaagctcttatgtgagtcatcattagagagtttggagtataaaagagataaagcaagtgatgatacagtaaatacacatatccttcacttacctccagtttaatgcttgtgacataatttattaaagggagtgatagttttagaacaatgcaagaagtcatatttgtagcactggaaacttttaatcagaaacagaaagatgatgcaatcaaataatgtagatcatgacaccaaatcctttacctaaatgaacaaacctcattacccatggacaacaagcttccaccctttaatgagttgtattagtccgttttcacactgctgataaagacatacccaagactgggtaatttataaagaaaaagaagtttaatggactcacagttccacgtggctggggaggcctcacaatcacagcagaaggccaaaggcatgtcttgcatggcggcgggcaagagagcatatgcaggggaactcccctttataaaaccatcagatctcatgagacttattcactgccatgtgaacagcatgggaaagacctgccccaatgattcaattacctcccaccgggtccctcccatgacacaaggaaattatgggagctacaatcaaggtgagatttgggtggagacacagacaaaccatatcacacaccatcaaaaacaaatcttccacgataatcactgcatgactgaaaattttagtccatcatatttaaggtcgtctctgaatctgaggccatatgaagtcaattgattcatgcaaatgtgtctttctgtgtagactacactaggaacatgtatgttataagtaatattcgccttcctcctctttaccagggaatatagtaggcagtgtagacactgagctggatagcagacaggatcctaatgaggagaataaaatgccatgatgattataaacacaccagcatggtcaagtttacataatcaggaagaacagtaaaggtagtaagaaatgaaggactcagaagtaaaaaactgtgatctcagatattcatctataatatgattataccaatgaccttacatttgccaagtgcaattgattttttaggactgatacaactctctagtgtattagacaaataggaatctccaaaagtgttttaccctagtttggaaataactatgggaaattaggaaaatgacaaacaaaaagtaagttggatatcagagcagaaagctttctaaagaaatagcataagtctgacacagcacttgagaacaaggaaattaaaactctagaaactgaatagaagcagaacattctctttccctccttccatgatctgattcgtgaatcacaatgtttgagttcggttagagctttgaaatcacatgtacttcttgaaagatgctcattttatttcttccttctgaagaattgttttagagccccctttatgtctttattcctcagactgtagatgaaggggttcagcatgggggtgaccacagtgtacatcagaggctgttgcacttgagagtgagttgtgggttgcagcagcactaaggtacaccccaaggctcatacaataaaataaggagacaactgagaggtgcgatgcacaggtggaaaatgccttgtacttcccctgagctgatgagattgcacgtatggaggaaactgtcttaaagtaagagtacaggatcccagtgaaacatcccctacctagaagcacagctgacaaatacatcaccatgtcattaagaaaggtgtcagaacaggcactgcggattatctgattaagttcacagaaaaagtgggggattttcaagtctgtacaaaagagcagtggcaacaccattaagctttctatcaaggaattcagggcactcatgatccaggacgccagaaccagcagtccacagagccgagggttcacgatgaccgtgtagtgcagggggtgacagatggccacaaactggtcataggccatcacggtcaagagtaagctgtccaacactataaagagtacaaaaaagtacatctgggtgatgcaacctgcataggtgatgactttactctgtgtccggatgtttgacagtgtctttgggactgtggtggaggtaacacagatgtctacaaaggacaggttagagaggaagaagtacatgggggtgtggaggtgggaaccagagcagatggccaggatgatgagcaggtttccaaacacagttgtcagatacatggagaggaagagtccaaacataacgggctgcaattctggttcctctgaaagtcccagaagaagaaatcctaaaatcctcgtaccattctctggttccatgtggttgaggtgactaccagtcagagaaagagaacatgaccaatttttactcaaaagggcatcactcacattgttgaaagacaaccagttatattttgcagccaagacattaatttctatattttgtgtatggaacttttcccagtttctgtgctcctcagagctgtctctgattgaaaattcttgtgctattctcaacctttccctaagaggttgtatattctttaatgagaaattcttctacgcacttgtgtaatattgattgtatgctgaccatgttccaggaactgtctaggtaatgagtgtagggtgcagagaaactgataaccttactatccaatgatggagaaagacaatgagctgataaagacatcatcatctgttgcgttagatggtgcttagaagaaaatgaaagcacattaaagagaatggagaggggttgctattttttatgagtgtacaggcaagaccagcagacaaggtgacatttgaacagagacctcaaggaagaggcggttgggagcccagaggatatttggcgaagtctgtgcctgacagagggaatgactaatgcaaaggcctgaggaaggtgcttgtttcggaaaatcaaggctcaaatagaagccagcgtgttgagggcaatgagaaggagggagagtgatcagagatggtgtcaggagtattgaggaaccaggtggtctccctgctgctgttgaaacttcaagacactgacagcctcgtctccccatgtggttctgagccctctattaatgtggccccctaaggacgtaaacagggcagcaaattccagcccaaaagcttcccatgcacatgtaaatgtggggctccattttatatcatcactttgtgcctggtatttaacaaaatacatgagaatttgctgaataaacaaagagatgcatgaaataggcatgatgtacacaggtggttgatgagagactgtgacgaaaacagcttcctcgtttctggcaatgttcaatcctggttatagaccccgatgcccagaataattcataattaataaaagtgatatctttatagggtcaagacatcttacagattgaagaccccaagagaaaatgaagaaagggaataaacccacacttcacaaaaggaatcacacaaagtccaacaaaagcggggggcggttaaagatgcaattgtgaaagacatgtgtaaattgtagtaaatgcaaagcaatgtatgtaaaaaacttggcatgtctcatttttgttcttaaatgaatggttatcactggtgatgagatgagactgatgttgctcttccacctctcatttacctgttttgtaatgtgaaacatctatcatcacaaaaaaaagtttggagttttgcatctactctgtacctgctgttggaccttgaaaagcctataaagtcattctaaatttttaaaaattttttataaatacataatagttgcacatatttatggggtacatgtgatactttgatataagcatacaacgcataatgatcaaatatgggtaactggcatacctgccctctcaaacatttatcatttctttgtattggaaacactcgtatcttctcttctagctatttggaaatatataataaattattaagtatagtcattctattgtgctgtggaacagtagatcttattcctttcatctaactgtagaacttattcctttcatcatcaaaaagcatacacatagaccaatggaacagaagagtaaacccagaaataaattcatgcatttacagccaactcatttttgacaaaggtgccaagaacacacattggaaaaagacaagctcttcaataaatggtggtaggaaaactggatatccacattcaagagaaatggaattagatccctatctgtcactacatagaaaaataattttaaaatagaaaaaaagacataaatgaaaggctcaaaactatgagattcatagaataaaacataagggaaattcatggcattgatctaggcaagtaatttttttgcatttttaaatttattattgctatttttaaaaattgtcatttttattgtgggtacatagaaggcatgtatatttctggagtacatgggatgttttaatacagctatatgattcatatcaatcacatcaggataactggggtatccattgcctcaagcatttatcaatcccttgtgttagaaacattccaattccactcctttaattatttcaaaatatacaataaattattgttgactacaatccccttgttgtgttattaaatattagatcttggccaggcacggtggctaatacctctaatcccggcactttggaaggctgaggcaggcagatcgcttgaggtcaggagttcgagaccagcctggtcagcatggtgaaacctgtctctactaaaaatacaaaaattagccaggcgtggtggtgcatgcctgtaatcccagctactcgggaggctgaggcacaagaatcgcttgaactcaggaagcagaggttgcagtgagctgagatcatgccactgctctccagccagggtgacagagccagattccatctcaaaaaaaaaaaaaaaaaaaaaaggatcaaaacgaacaaatgctaacaaggatgcggagaaaaaggaagtctttttctttttcttttttaacaagagacaggaccacactgtgtcacccaggctggaatgcagtggctcaatcatagctcactgcaaccttcaactgggctgaagcaatccttcaacgtcaacctcctgagtagcttggactgcagtcatgcaccaccacacccagctaattaaaacaattttttttagaaaagaagtctcattatgttgtccaggctactctcagtctggcctcaagcagcctcccgcctcagtctatccagttgctgggattatatctataagccaccaggcctggctaagaaagagaagctcttgtacattgttgctggagtgaaatttagtacacttattatgagaaacaggatggaaattcctcaaaaaaataaaaatgcaactaccacataatccaacaattctactactgggcattaatcaaaaaaaaaaaatgaaaagagtgtatcaaagagatatctgcactattcactcttttttttttttttgagatggagtttcactctttcacccaggctggaatgaagtggcgtgatctcagctcactgctacttccatcccccgggttcaagtgattctcctgcctcagcctcctgagtagctgggattataggtgtgtgccaccacgcccagctaatttttctatttttagtagagacggggtttctccattttggccaggctgttcccaaactcctgacctcaggtaatccatccgccttggccacccaaagtgctgggattacaggcgtgagccaccgtgcccggcctgataagctacactattcacaatagccaaggtatgaagtcaaagtgtccatcaatgaatggacttttagaagtaatatacatagacagtggaatgctgttcagcccaaaaaagaaggaaatcttatcatttgtgacgatatggatgaacctggagaacactgtgttaagtgaaataaaccagacacagaaagacaaattcctcatggtctcattcatatgtggaattttaaaagtcgatccgatagaaatatcaattagaatggtggttactagaggctggggcagttgagggagaaggggtatgaagttttttgttgaaggatacacaattgcacttaggagaaataaattgaagagatctgttgtaaagcacactgactatttgatgatgatatattgtattcttgaaaaacgctaagacagtaggtttttgtttgttttgagacagaattttgctcttgttggtcaggctggagtgcgatggcacgatctcggctcactgtgacatctgcctcccaggttcaagtgattcccccgcctcagcctaccgagtagctgggattacaggcacccaccaccacgcccagctaatttttgtatttttagtagagaggggggtttcaccatattggtcaggctcgtctcgaactcctgacctcaggtgattcacccgccttggcctcccaaagtgctgggattacaggcgtgacccacagcacctggcctaagacagtagattttaagtgttctcaccacacacacacacacacacacacacacacacacacaaactaggtgaggtaatgtgtatagtagttagctagctttaatcattccacaatgtatatatacttcaaaacatcatgctgtacacaataaatacataaaattgtatctgtcaattttaaaaataaataaataactttgtaaacttaagatgatccttataaggtgctaatctcagggcagcttgcataaaagggtcttaatatatctcataattaccaaatgttttatacttggaggataaaataatagttcttaacctgggttataagtatgaaatgtctcattgttctggctaaagcatgatgcaatcagacaagtagtaaccacgcttttaaatcaagagaacacagttcacctcttgctgaagaggggaatagcaattttccagagatatcaagggctgtgctcccagcaaaagtcaatgctttgtagatctaagggacctagccaaaacagcttcctttgtttcgactttggagaaaatgttccctcagggttatggtaatataagaggaggttagaactctggaactcaggccagtcgatagagaaggagaaataaaggctggatgcacctcatgtttaatcaggtgtcttgggaacagaggatgcaggaacaaatatatatatatatatatatatatatatatatatatatatatatatatacaaaaatatatataaatatatataaacaaaaatatataaatataaataaataaatatatatatctatatatatacacacacacacactatatactatatacacacacatatatctttcagtgccaggcaatgtcctatggggatgtgagtggtcagggttggaataacaggaggaaatgtgccaaatgaacagatatacaaagctctaaatatctcctctgcgttggccctcagcaaatgcaaccttggcctgaatgggacatgcttgtttcttttggagtcctccgacttggggactgatgctttgctttctgctgctgtctggtctcaggacagcttccgtctccatcatcaacaatccagggaggaatttgcacctcctcatggaggccttcctttcagaaaactcagcaaggtgagtccaatagcctcagctggtaccagtaggtaccgtaggaaatgtagctaactactatacacttgaccttacctaggttttttttgtttttttttttttttttttctgttgagaacacttaaaatctacttcttaggccaggtgcggtggctcacacctgtaatcccagcactttgggaggacaaggcagttgaatcacctgaggtcaggagttcgagaccagccttgccaacatggtgaagcccaccaccgtctactaaaaatacaaaaattagctggggcgtggtaatgtgctccagtaatctcagctactcgggaggctgaggcggtaccagtaggtaccataggaaagggtcagagagaatggcagctatgaccatggacctgaggtcacctgagagccagtctagactagccctgagcagagaaacttctgcgatcatttgtctgcttgcttgattcatttattcatgtatttgtttatgatactaaaaagaaaagtgaatattgagctcagaattgaagagtgattattgaaagttaagtaagggtaacggaagcccagttggaaggggacatgggagatttaaagtggctccagtaaaagtagaacatttgccctagcatttttgcaattaaatggagaagagaactaggctattagctgtgaagggagatacactgaagtgagggcgtgccttttttaggtttaagaagagacatatttgaggatgttttcacattgatgagaaaggtctaaaccaatgaattgcttccaaatgctacctgaccacagcagtttatgagacaaacatcttgcagtgtcttctctcatgctgttcattcaaatgaaagtttagaagttattcagtaaatgaaaagtgatatactaacaacactaactttgcaattctctcctcacttgtgaggctaaatatatttctgtgtttgttagacatttaccaactctattgcaaattatctgtgcatgttctttgcttttgtttttgttttgttttctgtttttgtttttgttttgttttgtttttgagacagggtctcactgtgttgcccaggccggagtgcagtgacatgatctctgctcactgcagcctctgcctcctgtgttcaagcgattctcctgcctcagcctcctgagtagctggtattacaggctcatgccaccacactcagcttatttttgtgttgttagtaaagacggggtttcaccatgttgcccaggctggtctcaaacttctgacctcaagtgatctgcccacctcagccttccaaagtgtgggattccaggagtgagccaccatgcccagccttgttctttgcttttgtatgatgggtttgtaatgttcttattcctatttttattgcatttttgaaataaaaattggagttgttttcaccgatgttggcatttgtcatgtcattcttttatatatgtatcagtgcatttgagaggaatgtgtgaaaggtcttttttttgttttttcttttttttgagatggagtctcaccctgtcacccaagctggagtgccgtgtcgcgatctcggctcgagtagctgggatgacaggcacgtgccaccacgccctgctaatgttttgtatttttagtagagacagggtttcaccatgttagccaggatggtctcaatctcctgacatcagtttataaagctgatgtagccaaatccatccattggtcatagtgtgtcccctcgttgctttgtaaatgcagaaagctctgtatcattttgccagataaatatccttttatggattacatttccaacttgctttcatagctctgtcatgctttattgcaccttttggctttttgaatttgacctctgtctagaagttgcatctcctttggccatcatttgaaaatcattctttatcatctgactcaagaccacttttatctctcataaacatatttgaatcttcccatatttatgtcatatgaaattataaccttagatacatatgaaggatgaaataacagctcttaacctgtgttataagtatgagatttctaattgttctggctaaagcatgatgaaatcagataagtagtaaccatgcttttaaatcaaacctgctcctacttttttttttttctgagacagagtcttgccctgtcgcccaggctagagtgcagtggcgctatctcagctcactgcaacctccgcctcccagattcaagcgattctcatgcctcagcctcccgagtagctgggattacaggcatccaacaccacgcctagctaatttttgtatttttagtagagatggggtttcaccatgttggccaggctggtctcgaattgctgacctcatgatccacccacctcggcctcccaaagtgctgggattacaggcgtgagccactgcaccaggccagtttctgtgaacattctttttctatactatgcacacatacattttatgcaaatgcacgaatactacagtttatgcaaatgcatgaatactatcctatgcatatcactaatactctatataatagtgtaattttttcatattttttcccctttccttttctattatacaaatcttctaaaagtactttcaaacatttatgttaagtctgtggttctcactgtggtggctttgtctgccaactgacattgagcaatgacttgcctggggagggtcagtaaagaacaaggaagctgttaaatagtacaatgaacaggacagaccccagcacagtaagtgatgcagcccagtatttcagtagtgctgggactgagaaacttgagttaatgaatatctgtattactaatatttatagctgcatctagattgcttccccaagaccctgtaacacttcacatttctgccaggaaaattagagtccccctttgctgcctcttttaaacatccaacccctctcaaggtggcagctgttgaagcttttccccaggctgatggttgtgatagagatttcttgttgtcttaaactattcctgggcttgagcagacagtcatatatatgatcatcgtttttacctacttattattatatgcccatttttctataatttgccacatttcaagtgatttttaaattgtattgcttcttcatggacttgcaagggtatactttttcttatttagctaactacatactaatcttgcttctgtttcttgcctttgttaagatgttttccctacacatagattttgtgtgtgtgtgtatgtgtgttataaatacattttcagtgccaccaaagaaatagcatttgaacatcaatttattttctcagcaaggcaatttttacttctataaaagggtacaactcgcagatggagtaatggtgagagcacacctgaacaagggaggggaaggggtttttattcctgacccacatagcccctactgctgtgtcgttcccctgttggctagagttggaccgcacagtctgagctaattccgagtgactattttaaagagagcaggggtaagagccagaatggcgtggtgagcagtttggcgggaaagatggttacacaacaggtaactaaaggtgacttaggtcagagtgggtgaccggggtgactcaggtcaaagcaggtgaccaggttgagtcaggacagagcaggtgaccaggggaacagatgtgaactactgattaaaactggtggaaaaggtgtttactgaaactacaaggaagttaaactttaaaatggaggacagagaactgaacatattgacatactgattctttgaagacaaatctagaattcactgtatccaacacatgcattttttacttttatactgaggtctttaaacctgctaattctttataggccatgagagagtgggcgaactaattgtctccaggtggatggccatttatagcagctgtcactcaatgatccaaataaattgaaatacaatcttgcatatgttaaatattcatatatattgagacttatttcctgatcattcaacaaatagcatctgctatgtgtcagaacattctaggaatgctatatattatgtaattttatatctaggatgttgccaaataaataacgaattcatttgatatcattaaattattattttatatcttgcttcagttaatttttgatgatccatacaattttatttaatacagcttttgaaattattgtatttaccctggctttattcccctaacattctttttatttcctatcttcttgctttaaattgttggtatataaaacacacatatttgtatatctttgtgaaaatacaaaggtaaacacaacaggagaagttgtacctgtgtggatcttgcattataatgattagagcagagtacaatgctataaatgtgcatataagacaatgtaggatttcattcattgcaaatggttaaaattatcatcatctatgtgggattttatagagtgtggtctggagaggccattgcatgttagatgaagaccagaaccaggactaaatggggccagcggaatctgtcaaaacagaagaccacaaaccacaaaggaaagatgccacacaagaaaagtgagaagggggctgcctcacctactatcagaccatataaaaaccccttgatttaaaacatattaaataagcacaagaaacaacaagtcttctactgtttttgtaaaaaacaaacaaacaaaaaaaatgaattgttggtttatttcatttgctcattttttattggcattctcaagctgtaggtgtcttgacacagagaaaacataattacgtatgtcatttggtaaatttcctttgtcatttataatttttgctgagtatcaaggggatatagtgggactcaaaatatctccacaactaataatgatttttctttcttatggtcccttgtagatcacctgagacttttagaccatttccctcccataatatccacataatttttctctctgtgtgtttattgagaagattattttctatttctttaaacacaaggcagaaaatagccatactaaaatggagctcaaggctacttgtgcatcgagatttccaaagtggaatttctagatatcatttctgttttctctcaagagaaaaattaattgatattgacaacttgcctggtacccactcctttctagtagtatgattgagcacaaaagaatattggtgtaacatagacccagggggtcatggtatgctccatgtgtgtatacattgtgtgtgtgtgtgtgtgtgtgtgtacatgcatgcacgcatgcctttagagtgagaggaggtttcagagaaagggagctttggctctatgttccaaaaggtaactcatcacacagaggccagaactcaaggcaacagtaacagtagcaaacaaagaagaaatgcattgcaattcatgtgacactgtttgcagccaaattagcaaagtgccaatgcaacaacatctggtcagagggactccttgtgtcttcaatttcagccacttcaaagtcagctctttccccaacatcccctgaaaccatctctcatccctctccttttgctcattcccctgctacactggcttccttgctggccttgaacatgtgcaagaagcacattcctctgagtctctcattaatccttccttctgccttgcacacacttctgcgggccacatggtgacttctgccctgccttcactatggtctctgttcatttgtcacctggtctgctggtattgcatcaatgaccagtaaaaaaatagtaaaaaaaaaaaaacaaaaaaaacccaccccgtccacactttccttcttatttcttttttcctcttcaaagggtttgtcaccatcggataccatatggtgacaccatatggtatttctcttgtttgtttgtattctttctctgtcactgatttgcagcaactttttttttttttccggagtctcgctctgtcacccaggctgaagtgcagtggcatgatcttggctcactgcaacctccacctcccaggttcaagcaattctcccgcctcaacctccagagtagctgggactacaggcgcgtgccaccacatccagctatatatatatatatatatatatatatatatatattttttttttttttttttttttttttgtattttttgtagagatgagaattcaccatattggtcaggctggtctcgagctcctgatgtcaggtgatccacccacctcggcctcccaaaatgctgggattacacgtgtgagccaccccacccagcctgtagtgacttttgttttatagaactaattattcaatgtccagacagtatttgtaacacttcagaattcactttatagtcctcaaatgcctaaaaattttctcatgaatactgcagagttcatgcactcagggaaagactgtgagtgggacaagaattcctaaccagggttgtcaaagggatgccctaacagaggctagattcacacgcaaaatgtagaaattaacttcttgtaaaatggaggttaccagagcctgggagaattgggggaggggggttgttggcaagatgatggtcaatgaatacaaaattacagttaaactaaaaaaaagttcaagagatctattgtacagtatgttgactctagtcaatggtaatacattgtatttgtgaaaaatcctaagagagtggatgtagagtgttttcaccacaaaaatgatgactatgtgaggtgatattaattaatattaattgacaagatttagccaatccacaatgtaaatatacttcaaaacatcatacacagcaaatacaaacaattctgtcaacttaaaaagaaataaaatgtattttaaaaattaagttattgaccgtagaatataaatgacagcatttctgataggtttgtaatgcacgctttcatcaagttctttttctctcattttgaaagtcattatcaatcacatagaaccagggaatgatacacagatttcagaatttcttcttctgggactttcagataaaccagaattgcagcccttcctctttgggctgttcttctccatgtacctggtcactgtgcttgggaatctgctcatcatcctggccacaatctcagactcccacctccacaccccatgtacttcttcctctccaacctgtcctttgcggacatctgtttcatctctactacaatcccaaagatgctcgtaaacatccagacacagagcagagtcatcacttatgcaggctgcatcacccagatgtgcttttttgtactcttagaagcactggacagcttactcctgaccgtgatggcctatgaccagtttgtggccatctgtcaccccctgcactacatggtcatcatgagcccctggttctgtggactgctggttctggcatcctggatcatcatgagcccctggctctgtggactgctggttctggcattctggattatcagtgatctggattcctcattacatagcttgatggtgctgtcactgcccttctgcacagatttccaaattccacattttgtctatgaacttaatcaggtcatccgccttgccggttctgatacctttcttaatgacatggcgatgtattttgcagtagggccactgggtggagttcccctcgctgggatcctgtacttgtactgtaagatagttttctccatacgtgcaatctcatcagctcaggggaagtacaaggcattttccacctgtgcatctcatctctcagttgtctccttattttatggtaggagcctaggggtgtactttagttctgctcctacccaaaactctcactcaggtgctgcagcttcagtgatgtacactgtggtcacccccatgctgaaccccttcatctgcagtctgaggaataaagacataaagagagctctgaatcaattcatcagggtagtgccattcttcaggaagtgacagtgatcccagagctctaagccttggactgagaaattgtgatttgtgaaccagattctggaagtaggacttgtctcttctatttattagctggagtttcaatttctttgattgccactattctatagaatttacacttttctgtggaaaactgctccttgatatccaacagtgttttgttttgtttgttttgttttgtttttgtcattttcctacttttccaaagttattcccaaactaaggtcagaaacaaagtggagattcctattagtctcatagagttgtgagctgtgttagcccaaagaataaattacacttggcaactataaagtcattaatgtaatctttttctttttttttgagacagtttcgctcttgtcacccaggttggagtgcaatggtgccaccttggctcactgcaacccccacctcccaggttcaagcaattcttctgcctcagtctccggagtagctggattcaggtgcctgccatcacgcccggctaattttttgtacttttagtagagacggggtttcaccatgttgaccaggctggtctcaaactcctgacctcagagatccgcccgccttggcctcccaaagtgctgggattacaggcatgagccactgcacccagcctcattcatgtaattttattgtagataaatatctgagaccacagtttttcttttctgagtccaccattctttgctctatcactacttgactgctctacttgacaatgtaaaccttaacacattagtgtgtttacagctcatcgtggcatttcattcttctcattaggatcctgtgctctattcagcccagtgtccatggtgcctaccacactccctgggcaggaatagaacaaaaattgcaggctgggtgcagtggctcacgcctgtaatcctagcactttgggaggccaaggtgggtggatcacaaggtcaggagttcaagacctgcctggccaacatggtgaaaccccgtctctactaaaaatacaaaacttagccaggtgtggtggcgggtgcctgtagtccccgctacttgggaggctgaggtacttatacctgactcttacatgggtccacagccttggtccttgatatggtttggctgtgtccccacccaaatctcaccttgaattgtaataatccccatgtgtcatcaagagtggggccaggtggggataattgaaccatgggggcggtttcccccatactgttctcatggtagtgaataaatctcatgagatctgacggttttataaatgagagttcccttgcacaagctctcttgcttgctgccatgtaagatgtgactttgctttttattcgccttccgccatgattgtgaggcctccccagccatgtgggactgtaagtccattaaacctctttcctttataaattacccagtctcaggtatgtctttattagcagtgtgagaatagactaatacatcgtgttaagtgttcttaacaccaaaacaaaacaagaaaaagacacaggatactctgggaaatgatggattgtatttttcgtagagacagggtttcaccatgttggtcaggcttgtcttgaacttccgacctcaagtgatccacccgcctcagcctcccaaagtcccaggtttacaggcgtgagccaccgtgggcctaataaatggtttataaatgaaggacgaggacagctcttgacttgtgtcacaagcggatctcctcattttttcatcaaaagtgttatgaagccaaggagtacggtatctatgattttatatcaaaggaatatagttctctcccttgttgaagaaaacaataacagttttctggaggtatcaggggtgagggctgtgcccaccatgtcaatgctttggaagtccaagaaacctagtcagggaaggttcttcagtttttgagttttggggaaactttctctcagggttgggacaaggtgatgggaggttagacctctggaaagcagaagagttcatggagaaggaataataaagactagatgcgcctgactctttttattttattttattttattttactttaagttctgggatacatgtgcagagcatgcagtttggttacataggtatacatgtgccatgtcgtttgctgcccctatcaacccatcatctaggttttaagccccgaatgcattaggtatttgtcctaatgctctcccttcccttgtcccccaccccctgacaggccccagtgtgtgatgttcccctccctgtgtctatgtgttctcatgatgcacctaacttttaacttggactcttgaaggcaaagaatctgcaagaaaagtttcctttctgtgcaaagcaatgtcccacaggaaaatgatgtgctgggggtctgaataataagctatgtgcccaacaagcagatacagagagctataaatatcactgttgtccctcagcgtgtacaaccttgggctggaagggacacatgtgattatttattctggagtgctaggtctacctcagggaccagtgcttgactccttcctgctgtcttgtctggcgacagagtttcagtctccaccatcaaccattcagagaagaatttgaattcccacacagagactttcctctgagagatcccatccaggtgagtcggagagcccagtagctacttcagaaaagcttcagagagaatagaaacagagaatatttacccgaggtcacttgagagtcagttcagcctagtccagagcccagagattgcagtggggtttttttttttttttttgcttgtctgcttaattaattcaggttttcgtttatgacgctaaaaagagacatgaacattgacctcagcaatatactgctcgctgttgatatttaagtgatggaagcataatgagaagaggaaactgtaggcatagagtggttccagtagaagcagaacaaatgtccacgaatctctacaattttcggaagcagacaaatagggtattggctcgggagggatacacactgatgtgagcgcattctctctttttttttttttttgagaaggaatctggctctgtcgcccaggctggagtgcagtggggagatctcggctcactgcaacctccacttcccaggttcaagcgattctcctacctcagcctcctgagtagctgagactacaggcgcctgccaccacgcccagctaattttttgtattttagtagagacgggtttcaccgtgttagccaggatggtcttgaactcctgaccttgtgatctgcctgcctcgacctcccaaagtgctgggattacaggcatgagccaccgtgcctggactcttttgtttttaagatggagtatatttgagcatgcttccacactggtgagaaagatccagaccagtggattgtttgctaatgctaccttacaacagtagttcatgaggcatacgttttgcagtagtctcccttcatgctaggtagtcagatggaaaaagtatacattggataggtggaaatgggtgcactaatgagctttatttgcgattatttcttcactgctgagtctgaatatatttgtgggtttgttagacatttactttctcaattgcaaattgtctgtgtgagtgctttgctttcgtggagtgggtttgtttgcagtgtctttatttctgtttttgattgcattctttcaaacataagaactggagttttaggccaggcagggtggctaatgcccataatcccagcactttgggaggctgaggtgggcagattgctggagctcaggagtacgagaccagcctgggcaacgtagtgaaatcccatttctacaaaaataaacacaaaaattagccaggcatggtggcatgcacgtgcaatcccagctactgggaggctaaggtgggaggatggcttgagcccaggaggcagaggttgcagtgagctgagatcatgccactgcactccagcctgggcgacagagccagaccttatctcacaaaacaataaaaggaattggagttaaggtggggtatatttgagtatataccaccacctttgctgtttaacatttggttatgttatgtacatatagatgtactgcatattttatgtacgtatagacgcatctatacatgtgtagatatatgaaagtttgtaagttttgtgtgatcaaatctatctgtcatactgtgttcccctgattgcttttataaacatacaaagttcttctgcatcatttgagtaaataaatggcctttaatacgtttccaatttatttttgtctgtgttatttgtaattgcacctttgtccttttgtcgttcaatctatttctacaagtcacactgtctttgaccatcatttggaaggcattcttcttcttcatttgactaaagatcacctttatcttttataaacatatttgatccatgtttctttacgtaagataaaactataaatttagatatctgtcgctcaattatacagtatattctcttgtgactaggtctgtgttttgttttgttttgtttgttttcttttttgagacagagtctcgttctgttacccaagctggagtgcagtggcatgatcttggctcactgcaacctccgtctcccaggttcaagcgattctcctgtctcagcctcccaagcagctgggattacaggcatgcgccaccacgcctgtctaatttttgtattttttggtagagacggggtttctccatgttggccaggctagtcttgaactcctgatctcaagtgatgcttctgccttggtctcccaaagtgctggaattagaggcatgagccaccacacccagccttgtcctggtgttttatgtttgtactttaataaattggctccaaagatgtcccatgaattgaaatgcatctcctgtttattttcatatgctgccttgtgttctgacctctgtattctgagtcatcttttggaatatattgagtctagatccctttattcttaaaaggaatatttctacctcagttgtatgttatattctcttatgcgtaggtctttgcgactatatttatccacattgaaatcattaaattactgctatttcgtgtctcgtttcggttcattactgatgcttcttttgattttatttaatatattgttattttgaaaccactatatttaaactgattttattctcttgccattcttttcatctcattacttctcattttcttaaaacgtgtttctatacgatgcacatgtattcacatacatttgtgaaaacacaaaagtgaacaaagcaagttaagtccccactcatttatatttggcatgagaatggtgaagacagaatacaatgaaataaatgtgtgtatgacacgatgtcctcagggattaattgcatgaagaaggcatttcagtgtaaaaggacttgtcacagtgtgcacagaattttacgtaataatatcagcgaagcctttgcatgttgcaaaaagaccagaaccagaactagagcgtgcccgtgggattgtaaataaagagatcaaaatccaaaacccccaaaaaaatagcaaagaatagattgccggccggcgcagtggctcatgcctataatcccagcactttgggaggtcgaggcgggtggatcacttgaggtcaagagtttgaaaccagcctgaccaacgtggcgaaactccatctctgctaaaaatacaaaattagctgagcgtgctggcaggcgcctgtaatcccggctactcaggaggctgaggcaggagaatcacttgaacccgggagatggaggttgcagtgagccgagacggcgccattgcactccagcctgggcaacaagagtgaaactctgagaaaaggtgcccacctcttcatcttctgtcggaccatataaaaaccaattttccaaatcaatatgaaataggctacaggaaaaacaagttttttactgtttcatatattaaaaatgcccaaatttggttgttcttggttgagctgttggtttatttcctttgcccattctttccatgggtatgttcaatctctaagtgtcttgaccccaaaaagatttcatgacttctatcttttggacagatttgttttttatattctattattttggctgagtatcaaggagacatattgggagctggagtatggctgtaaccaaggaaacttttctcttttttctttttcttaattttttttttttttttatttccatgggttactggggaacaggtggtgtttggttacatgagtaagttctttttttttatgagtaagttctttagtggtgatttgtgagattttggtgcacccatcacccaagcagtatacactgcacataatttgtagtcttttatccctcacccccttcccaccctttcctcctgagtccccaaagtccattgagtcattcttatgcctttgcatcctcataacttagctcctacttatgagtgagaacatacaatgtttggttttccattcctgagttacttcacttagaataattgtctccagctgggcgcagtggcgcatgcctgtaatcccagcactttgggaggctgaggcgggcagatcaccttcggtcaggagttcgagaccagcctggtcaacagggtgaaaccccatctctactaaaactataaaaattagccgggcgtggtggcaggtgcctgtaatcccagctactcaggaggctaagacatgagaatcacttgaacgtgggaggtggaggttgcagtgagctgagatcatgccattgcactccagcctgggggaaaagagggagactttgtctcaaaaaaaaaaaaaagaataattgtctccaatctcatccaggtcactgcgaatgccattaattcattcaagcaagctatttcttcttcctagtctcccaggaattatctgaggttattagattttccccccttgggttttatttaattatcctctgtatgtttatcaagcaaaattgttgtatttttataattttttatgtttttttaaacagaagacagaacatgaccatacaaaaaaatggaaagataatctgatattgaaagcttgcttcatttccattcctctctaatattaatggtgtgactggaggtgagaacagcttgctataaacacagtcccaggagtcctcattcagcttcaagtgtgtgcctgtgtgtgtgtctgtactaattgtgcatatgtgtgtctgtctttagtggggagagtgatttcaaaataacatcattaaacagaattgaaaggagccttgctaattaactgaaacaagatatgaagtagcaataatttaatgttttcaacatggataaataattaaagttgcaaagacctaggcataaaagaatatgacatacaaatgaggtagagatatcccttttaagagtagagggacgcagtggctcacgcctgtagtcccagtactttgggaggccgaggcaggcagatcacgaggtcaggagatcgagaccatcccggctaacatggtgaaaccctgcctctactaaaaatgcaaaaaaattagccgggcgtggtggcgggcgcctgtagtcccagctacttgggaggctgagtcaggagaatggtgtgaacctgggaggcggaagttgcagtgagccgagatcgcgccactgaactccagcctgggcaacagagcgagactccgtctcaaaaaaaaaaaaaaaaaaaaaaaaagtaaagggacctggactcaatatattccaaaaggtgactcagaatacagaggtcagcacgcaaggcagcatatggaaataaacaaaggatgcatttcaattcatgggacatggagccaatttattaaagtgcaaatagaaaacatcaggacaagcctgggcgtggtggctcacgcctgtaatcccagcactttgggaggccgagacaaaaggatcacttgaggtcaggagtttgagaccagcctggccaacatggtgaagccccatctctaccaaaaaatataaatcttagcagggcatggtagcaggcacctgtagtctcagctacttgggaggctgaggcaggagaatctcttgaacccaggaggtggaggttgcagtgaacccacatcatgccactgcactccagcctggccgacagagtgagactctgtctcaaaaccaaaccaaaccaaacaaaatctgggcagagggacttcttgtattttgaagcttcagcagcaatgaagtcacctcatagtgcaacatcttctgacaccatctcccatcacttacctctcacagatttccctgccacactggcttcctcgttggccttgaacatctgaaaccttcctctacacctttgcaccggccattctttctgctgggcacacacattcccagatatcctcatggctcccgccctgtcttccttgaggtctcatttctctttttaaaaatttcagcttttcttacagattaaagggtacatgtgcaggtttgttacacgggtaaattgtgtgatgctgaggcttcgggtcctaacaatcccatcactcaggaggtaagcataggacccaacagatggttcttcagctcacatccccctccctccatcctctgtccagcggtctccagtgtcaattgttcccatctttgtgttcacgtatattcgatgtttagctaccatttataagtgagaacatgcgatatttggttttctgttcttgcattaggtcgctcagaataacggcctctagcttcatccatgtagctggaaaggacatgatttcattcttttttatggctgcctagtattccatggtgtataagtaccacagtttctttgtccaatccactattgatgggcacctatcaccttgactgctagtattctctggacacctaggaaaattaacatcctctatccaccctcgcctttttaccttctttctttttcttgctagccctggttaccatctgacacagtatatgatttacttgtattcttctccatacttcactgtaggaacttttgtttttcagcactgttcactcattgtctagacagagcctggaacgttgacaacactcaatttaaattcctcaaatccatgaaagaatttatcattaaagtattggtttttgttttgttttgttttgttttgtttgagatggagttttgctcttgtagcccaggctggatggagtgcaatggcgccatcttggctccctgcaacctctgcctctcaggttcaaatgattctcctgcctcaacctcccgagtagctgggattacgggcacgcaccaccacatccggctaactttgtatttttagtagagatgggttttctccatgttggtcaggctggtcttgaactcccgacctcaggtgacccgcccacctctgcctcccaaagtgctgggattacaggtgtgagccaccgcacccggcaaagtttttaaataaatgaccatttggggaaaagttgagcatcatgggaaaggaattcctaagcagagatgggatgggagatctcataaagtagaccagattcacacacaaaatatagaaattaacttgctgactgtaggatataaataatagcttttctgatgggtgaaaaaagcatgcttatgtcatgtattttctctctctctcttttttttttttttatagtcacctctaccacatggaaccagagaatgatacacgaatttcagaatttcgacttctgggattttcagaagaacccagactgcaacgatttctctttggtaaaaggcaaaagatttatacaatttgaagagaaaccagagcataacgatttctctttggagtgttcttatccatgtacctcatcattgtatttggaaacttgcttatcatcctggttatcattttatgctcccacctccacacctccatgtacttctttctctccaacctgtcctttgtagacatctgttttgcctccaccagggtcccaaagatgctggtgaatatccaggcacagagcaaagtcatcacctctgcaggctgcatcacccagatgtactttttcatacattttgtaggattggacagcttcctcctgactgtgatggcctatgaccggtttgtggccatctgtcaccccctgtactacacggtcatcatgaaccctcaactctgtggattgctggttctggtatcctggatcacaagtgtcttgcattccttattacatagcttaatggtgctgcagttgtccttatgcagagagttggaaatcccccactttttctgtgaacttaatcaggtcatccaccttgcctgttctgacacctttcttaatgacatggtgatgtatctggcagctgtgctgctgggtggggggatgtctcgctgggatcctttactcttactctaagatagtttcctccatatgtgcaatctcatcagctcaagggaagtataaggcattttccacctgtccgtctcacctctcagttgtctccttgttttactgtacaagcctaggagtgtaccttagctcggctgcatcccacaactcacactcaggtgcaatagcctcagtgaggtacactgtggtcacccccatgctgaaccccttcatctacagcctgaggaataaggacataaagagggctctgaagaattctttgggagggaaactagaaaagggccagttgtcctagggctgaagctatatccatgattgcaaggctcaaagcctcagagccagatattgctgttgtttaatcagatcatggaagtggaaactgctcttttttttttttttttttttttttgagacagagttttgctctgctgcccaggccagagtgcagtggcgccatctccgctcactgcaagctccacctcctgggttcatgctattctgctgcctcagcctcccgagtagctgggactacaggcacccaccaccgcacccggctaatttcttgtattttcagtagagacggggtttcactatgttagccaggatggtcttgatctcctgacctcgtgatccaaccgcctctgcctcccaaagtgctgggattacaggcgtgagccactgcgccgggctggaaattgctctatttatttcctgaagtttccatttcttttatctcaactgcttcatcaaatttaagcaactcctattattaagctttcctctctctctaatattcaacagattttccccttgttttcctcctttctcaaagttattcccaaccttgggtcagaaacaatttggagattcccatttgcctcatagggtgatgagttgtactattcctatggaataaactacgcttggcactgaggccatttatgtaattttattggagaagaatttctgaggctatggtttttcactttttgtgtttgtcattcatttctgtatcactaccttaattgatcttcctgataatgtagacttaaacatactagggtattttatagctggttatgggatttttcactcccattaggatcctgttctcttcttgaactcagtattcatgaattctactatatttactggcactgagtacttagtcaaaagttgctcatcaaataaatgctccaagcatagtctacacagaaagacaaactggcaaaaatcaattggctttacatggacttagagttagagatgacgttaaatatgatagagtaacattttcaattatgtactaaatttctatggaaggtttgttttcaatgatgtacatctactcattgaagtgtggaagcttgttattcatgtgtaatgaggtttgttgatctgagtgaaagatttggtgtcatggtctatattattttattgtatcatcttgctgtttctatttgaaaattctagtgttacctacaaatatgactacttacattgtccaaaaaatatttccccctttaacaaatgtaatcataacacaaaatacagatgattgaacaatatgtgtatttacttgatcatcaattcctttacatcttttataatctaaattcttttcagtcctcatgatcaaagattattctgttgatatctggatatttatatctttcctgaaagttggaaagttttcagttatttttttgataagctttctgtctctttgttcattccttctctttcttgattcctgttaattcaaatatttaccctccttatgctgccccataaaatcccataagttttcttcactcctttttattctgtttttctcctctgagtgtatgttttctaataatctgtcttcaagttcatagattatttcttctgctttatttcttctgctttatcaatcctgctgttgacactctagattgcatttttcatttcattcattgtatttttcatcttgagaatttctagagtttttttataatttcaatctctctgttaaatttcaaattttgttcatttattgtctttctgattttggtgaattgtttctctgtattttcttaaagtttgctgcacttccttaaaacaattatttttgaattctttgtcagaaagttcatatatctccatttctttctttttatttaaaatatataaataaatatataattgttttttaaaaaaattaaaaatcacaatacaacaataaaaataatacaaatttttaaataaagtataacaactatttacagagcatttacactgtgttcagtattataagtactctagaaatgatttaaagtatacaggagaatgtgcatagctaatatgcaaatactatgccattttatataagggacttcagcatcagtggattttgttatatgcagggtgtcctgaaaccaatcccctgcaaataaggaatgacttactataaagaagaaaagtgagaggttcgcccaggaataaggcactgaccagatgaatgtttcatcacttgaacacatgagcattgtaaaccctatagtaggtcttcccatctggtgagaaagatctcatcttgttgattattccttcaggcagaaaattgtcactcagaggggatgctgtgtctcactattcttattttctggaactgttttaatggtattttatttgggctttaaaaatcagtcctagccatgcatagtggctcatgcctaaaatgtcagcattttgggaggttgaggcaggaggatcacttgagcccaggttgttcccagaccaaagcaagggtcaggctgcttattctcatggcccattaatgagatgcagatgaactagggaggaaaagagtttttatttctgtaactggttacagggagaaggcctggaaattaccactggatcaactcaaaaattacaaagtcttccagagtttatataccttctaagctatatgtctatgtgtaagtgtgcattcatctaaatacataagtgattaacttcttttaatctataactaagatctgagtcctgaagaccttcctctggagcctcagtaaattcacttaatctaaatgggtccaggtgctggggtgattacccttatcttgtctcctgctaaatcatggaggtttagggagttccttcagacccccaacaaacttgtttgtggaggcctggggagtttcttcagacccccaataaaacttgtttaatcctaaatgggtcctgttaagaattccttcattatcttctcacgtttcagggcccaggaaaggcctaggcaaagctctgggtagccttttttttttacattccagcctttgtataaaggcactggccctatcagtttttaatatttaacttaaccactcagtcagtgctgaaacagttgttagagaggtctgctttagtaggacctagcctgctacaaggtgtttgagaccagcctggccaacatagcaagaccccatctctaccaaaaaaaaaaaatgaaaaaaaaattagtcctttgtgaattgttaaagacggtctatattctctggaatggaataacaagcagcatccaatggacttgttttgaacctgtaaaagtgtagatacctgcagggtcctgcctggacagccaggcaaaccacctctcatcttctcttcgcgtacctggaactttctctatattgcaccttcaatagtaagaatagaacttgtggcaaagtcattggaatggttttgttcagagttgtgtgtggtccctgtccacaactccaagttaagttgctcaggactcaaaggtctttttaaaaaacaaaaaaacaaaacctgcctgctcgtgcgcaaagaaactccatctaaaatgttgaggccaggcgcggtggctctcacctgtaatcccagcactttgaggggctgaggccagtggatcgcttgacgtcaggagtttgagaccagcctggccaacgtggcaaaaccccgtctctactgaaaatacaaaaattagcctggcatggtggtgggtgcctgtagtcctagctactcgggaggccgaggcaggataattgcttgaacccgggaggcggaggttgcagtgagccgggattgtgccactgcactccagcctgagcgacagagcaagactctgtctcaaaaataaatagataaaaataaaaaaataaaatgttgaggaaaccatcactggggaggacaataaacaatggaagccacatcaggcagaaaagagtatcataagcaaagagccccagagtaagggattcccatacctggtatccaagatgctcccaagaatacaaaactagcagaaaaaagtgtttctattttggctccctcactcatgggaatgaaattgcttagagaatagagttagaacggagtgattaatttaatgagcattcatgagaattcaacctctaagtctgatagtaaatatgccccttacacctgttacttactgctcaaatgttccaggaagcagggagttcgactttcagaggacttatgcccaaggccacatctccgtccatccctgaagctgagttgaacctccatcacccagggaagaaaggacctagggaactagaggctcagcaatgccctggagcatctgaggtggggaacaggtatggaggcaggcagagctctcaaaggaagaactttggcggtgtaaatggggacagtgtggtgaggacagtccattcacttaaagcatcctgcacaatgaattcctgtgtctctcttagctcttcctcttagctccctctcaggtgtcttcctctctcttccaggaccaaattctgaggctctttcgccttcctaataaaaattgacgtgttagcttctagtatctctcaaaagtttcttacccagccatcttagctgtttttctggagccatttaaagtgcttccaagaaataaaataagaaaaacaaaaaagaaaaagaaaaaataataaaaatgcttccattctcctgtatcaaagatgctcctatgttgtttacccataatatcttactcagttactcattcattcattcacttaagaaacattccctgagatttcatagttagcactcgcaagcccattgcatacatcttctgacattagtttacttaatatttctgtgtctcagtctccatatctgtaaaatgagtataatagtcatatccatttcatggggttaagatgagaattaaattagatctaccctatgatccactaatcccactgctgcgtatatattcaaaagaaaggaaatccatatatcgtttttgtttttggttgttggttttttggttttgggtttttggttttttgagacggagttttgctctgtcaccccagctggagtgaagtggcgtgatctcagctcactgcagcccccacctcccaggttcaagtgatcctcttgcctcagcctcctgagtagctgggattgcaggcacccgccaccacacccagctgatttttgtatttttagtagagatgggctttctccatgttggccaggcttgtcttgaactactgacctcaggtgatccacccacctcgtcttcccaaagtgctgagattacaggtgtgagccaccatgcccagcctggaaatctgtatatcaaagaaatatctgtacttccatgtttattgcagtgctattcacaatatccgagatatggaatcaacctaagtgttcatcactagatgaatggataaagaaaatgtggtacctaaacgaaggaatactattcagaatgaaatcctgccagttgctgcaacagggatgagactgggggtcattatgctaagtgaaataagccaggcacagaaagacaaatattgcatattctcactcatatgtgagagctaaaacatgttgatctcatggaggtagaatgtagaatgatagttatcagagagtgggaagggtgtggggtgatgaggtgagattgactcatgggcataaaaacacagttagaaggaatactttctagtgtttgacagcacagtaggggtctatagttaacaataatttattgtatatttcaaaatagcaagaagagatttgaaatgttcccaacacaaataaatgataaatgtttgaggtgatggatatgctaattactctgctgtgatcattatatattgtatgcatatatcaaaatagcccatgtaccccataagtatatacaattattatgtatcaattttttaaataactataataaatattttaaattaaaatgaggattaaattggctgggcgcggtggctcacgcctgtaatcccatcactttgggaggccgaggcaggcggatcacgagttccagagatcgtgaccatcctggctaacatggtgaaaccccgtctctactaaaaatacacagaaaattagccgggcatggtggcgggcgcctgtagtcccagctacacgggaggctgaggcaggagaacggcatgaacctgggaggaggagcttacggtgagcggagattgggccactgcactccagcctgggcaacaaagcgagactccatctcaaaaaaaaaaaaaaaaaggattaaattaaagatcatgcataattttttaatagtctccaagatctagtgaacacctactcatgttaattattattagtgcattattataaacacattttcattcattaaatcaaaaaaattgtgatgatggtcaaatgaactaagacatataaaatatttgacaagtgcttgacatgcaaaagtccttaatagattttagctattattacttttatttgttgagtatttacaagtttccagtccctgttccaggaattttatattcttggatttttttaaatttctttttaacttttaagttcaagggtacatgtgcagttttgttatataggtaaatgtgtgtcatgagggtttgttgtacagattatgtcatcacccaggtgttaagcctagtacccattagttattcttcctgatccactccctcctcccctactccaccctccaataggccccagtgtgtgttgtttccctctgtgtgcccatgtgttctcatcatttagctcccacttataagtgagaacatgtgatatttggttttctgttcctgtgttagtttgctaaggataatggcccccagctccatccatgtccctgcaaaggacatggtcttgttttttgctatggctgcctagtattccatggtgtatatgtgccacattttctttatccagtctatcattgatgggtatttaggttgattccatgtctttgctattgtgaatagtgttgcaatgaacatactcatgcatgtgtctttataaaagaaggatttatattcctttgggtatatacgcagtaatgggattgctggaccaaatggtatttctatctttaaatctttgaggaataaccacactgacttccacagtggttgaactaatttacactcccttcaacagtgtataagctgttcccttttctccacaacctcaccagcatccatgcttgttaatgtttgaaatgatggagatgtatttttaagagattcaactgtacatatgaatgctacttttatttttccttggactcaattttttgttaatttttatttttgaataatttggatttacagagtagttacaaagagagtacagagttcccataattcccttacctattcctatgggaactaggtaaaagcaatggttgaaaaacattctgaatgtccctctgaatgccaccttagaatggctactgctttttacagatttgttttgtttcagctgccttattaaaatcatgctcagttaaaataagttttcaggctgggtgtggtggctcacgcctgtaataccagcactttgggaggctgaggtgggcggatcacaaggtcagcagttcaagaccagcctgaccaacatagtgaaaccccatccctactaaaaatacaaaaattagctgggcgtgttggcgtgcacctgtaatctcagctactcaggaggctgaggcaggagaatcacttgaacccaggaggtggaggttgcagtgagccgagatcatgccactgcactccagcctgggagaagagcaaggctctgtctcaaaaagagaaaaaaagaaaaaaaaaagaataagttttcagctaccaatccatcatccacagccaatccatcatccacagccaatccatcatccacagccaatccatcatccgaaaacaaagttatgttgcctttttaatataggtctcatttctttttctccttgtattgcattggttgaaacttccagggcactgacaaataattactaataataaacatacttttcctttttaattcttaaaggagaattctcctgttgttcctgccacacagcctcaccagggcatttttggaagtaagttctgtttatttaattccttccttagttattgatctgttttcctccatcccgaatcaactttgggcacttatgtttttccagaaataaattcatttcttggggattttcacatttttaacatggcgttataaatgacattatcttgcaaagttgagtgtttccttatctctgtgttcatttttttctcattcttggttttaggcctttctgctctttctccctctttgtatcccttttgttacacttctaattttttctattcgtttgtggttgccaaagaattcgctctggaatttatttttcagttccagaatatttcttctttttagttcattaattctgctttgatctttattagctactcctttctgttttaacagaatgttaaatattttgtgataatttttaacaaaatcaaattttacaatattgattttataacacttgtattgacaatatcttcaaatttttaagtttttatttcttgaggataggctacacatgtattcatttgcaattttcaaacaatatgctaaaaaaggaatctaaaaatcaaaattaatgttaacactcaaagatgatccctcttcatactttggggtatgttgttatggatcttttttttcttttggtgccaatatgtgtatagtttaagagatccataggctgagttcatttctctagctcagaaaaggagaccaaatgtcttttcatagcagtatctgaaatgttttctttccacatgatggaatttttttttccccctagatggagtctcactctgtcgccagactagattggagtacagtggcgcgatctcggctcactgcaacctccgcctcctgtgttcaagccattctctctcagccttccgagtagctgggagtagctgggattacaggcacgtgcaaccatgcccagctaatttttgtattttcagtagagacggagtttcaccatattggccaggatggtctcgatctcttgacgtcgtgatccgcccgccttggcctcccaaagtgctgggattacaggcatgagccaccgcccccaaccgaaattttgcattcttactcttctttcatacagacattttaattccctcagtgaaaggggtatgttattgttaattttacttttttagattaacagtaaaaataaaacattttctcaaacatttattatccttttacagttcattttatgaacctttaatattctatttattttccccatcagtgcattaatatttcaatgatttataattgtctttataaagatattaacttttgtcagttacataaattttttttttgcattctaactttctgcaaggcacattttctcattcagaatttttcaatttatggttctagttgctgatctctttttctatcaaaggtgaattattcagaaagaatttgtactttcaaagattatatctatccatgtataaatttatataatctatatgtttatctatgttttcttcagatagcttatgtagtctcttgtctgtttgaaatgtatttgggactacagagatgggatttgacattattttttctaaataattaatcattaaacacttatttatacctttaaaaaacactatttaaaataactaaaggaggccagggaagatggctcacacctgtaatcccagcactttgggagcctgaggtgggtggatcacctgagatcaggagttcaagaccagcctgaccaacatggtgaaaccccgtctctactaaaaatacaaaattagccaggaatggtggcacatgcctataatcccagctacttgggaggctgaggcaggagaatcgcttgaacccgggaggcggaggttgcagtgagccaagatggtgccattgcacttcagcctaggcaacaagagtgaaacttcatcttaaaaaaaaaaaaaaaaaaaaaccacaaaacaaacaaacaaaaaactaaaggattataattggattgcttgtaacacaaaggataaatgtttgagaggatggatgccccattctccatgatgtgattcttatgcattgcatgcctgtatcaaaacatctcatgtaccccataaatacatacacctattacgtacccacaaaaattaataataagttttaaaaagagaaataataaataagacctagtatttgctagcacaacagggtgagtacagtcaaaatcaatttaattgcacattttaaaataacaaaaagaatataatttgattgtttgcaacacagaggataaatgcttgagggaatggatgctgcattttccatgatgtgattactatacgcattgcatgcctgaatcaaaatatgtcatgtaactcatagagatatacacttacccacacaacttaaaaaaataaaaaaaaaattttaaacacactcaagtatccagaaataaaaaatgcaagttaacgtgataaaaattacacattctaaatcacagtgaacatcatattaaattacaaaactctagggttattctatttaaaaaagaagaagaaaaagaagaatgccaactcctaccataaattttaaaaggattctaaaatttcaaaccaatgcaataagacctaaaagagaaataggtgttattaattagtattatttggagaaaatagatgaattttagagaaaaacatgaaactaagaagaaaacccagaaaaagaatatggcacctcttcaatacaaaaaaagcaaatgacttcctaatataataccaatagcagagatgttatgtgggggggtattacattaaaatattaagaaattaacataatctatatgtgtatttttaacacgtgaacaaaaatgtctacccaaaaaaggattaaaatatgcagaggaacatttctgctactggaatgagaatttgaacataataaagatgtcaatttctctccaaattaattgataactttaatgtaatctccaataaaattccaatggtatttttcttgcaacatggctagaggattctaaagctcatctgggaggataaactggcacatcagaaataaaattatgaaagaaacaatactaagcaaatttctcaactcaatgtttaagtatattttgaagatagacaattaaaaatatggaacaaaagatttgataccctgcttgctgtcatggcacagatgaccatttaaaattatctatttataagagtgtgaacaagaaaatgtcttaatgtttttgttgttgttgttgttgttgttttttgagacagagtctcgctttgttgcccaggctggagtgcagtggcgtgatctcggctcactgcaacctccgcctcctgggttcaagcaattcttctgcctcagcctccctagtagctgggactacaggtgtgtgccaccacgcccagctaatttttgtatttttattagagacggagtttcaccatgttggccaggcttatctcgaactcctgacctcgtgatccgcccaccttggcctccgaaagtgctgggattacaggcgtgagccaccgcgcccggccggaaatgtcttaattaaaaaaaaaaacaacaacaactgagaaaggccatttacagattaacctaagagaagaaaatataaaaaatataaaactatagttaatcaaaaactttctttgtctttaagaaaacttagaaagtaagtaaatgtccaacatggacaagttttaaagagccatttctgtatggcagaatattttgatctgatggaatcagatgatggaaaatggggataaaatttaattctatatctagaaactctagggcttttctatttcaaagttccatttttgttgagtttagctagggagattgataatataaatgaaatgtaaacaatgatgattaaaaacagtggttattattttttagcagaaggggcatccaagatccagaggatttaacatgtagacattacaactgggcacagtggcttgcacctgtaatcccagctacttgggaggctgaggcaggaggatcacttgagcccagaagttcgagactgcagtgagctaggatggcgccactgcactccagcctgggcaacagagccagaccttgtctctaaaacaaaatgaaaaataaattacaggaatgcagcacaatagaagaaaaagccttctgaggattgacaatctgcctagaattagggaattctcattgcctgatttcctaatccccatgccttaggcagaaagggcaagagcagccaccagggatgctgcggtgggaaggattgcttagggatacaggcaagcgctgaagcaatagtcctcaaacttgagtgtgcatcagaattccctagagggcttgttaaaacccagaatgcaggccaggcacggtggctcatgcctgtaataccagcactttgggaggctgaggcgggcggatcatctgaggtcaggagtttgagaccagtctggccaacatggagaaaccgtgtctctcctaaaaatacaaaaaaaaaaaaaaattacctcagcgtggtggtgcgcgcctgtagtgccagctactcaggaggctgaggcatgagaattgcttgaacctgggagccagaggttgcagtgagctgagattgcaccactgcactccagcctgggcaacagggtgagactctgtctcaaaaaaaaaaaattaattaattaaaattaaaaggccaggcgtggtggctcatgcctgtaatcccagcactttgggaggccaacgcaggaggatcacgaggtcaggagttcgagaccagcctgaccaacatggtgaaaccctgtctctactaaaactacaaaaattagctgggcgtggtggtacatgcctgtaataccagctactctggaggctgaggcaggagaatcacttgaacccgggaggcagaggttgcagtgagccaagactctgccactgcactctagcctgggcgaaagagcgagactccatctcaaacaaaaactaaaccagaatgctggctccatacccagagtatcagattcagtcggtcaggtgggcatgataaggcacatgtctaatgagttcccaggtgatgctgatggggctgttccaggaaccacagtttaaggaccaatgatgtagagatgacttctccaggtagcgatggtaactgtaacttgtcggcaaagaaatccaataattagccaaaatgcatgatttcttgagttccctgggtttgaataaaggatattgcagtcattctggggaatgcttatttggagtaaattttgtgtggctgttttttttcctccttctcggcaaacccagcggccccatggaaagaggaaaccaaacagaagttggaaactttctcctcctgggattcgcagaggactctgacatgcagcttctcctccatgggctgttcctctccatgtacctggttaccatcatcggaaacctgctcatcatcctgaccatcagttcagactcccacctccacacccccatgtacttcttcctctccaacctgtcctttgctgacatctgtttcacatccacgactgtcccaaagatgctggtgaatatccaaacacaaagcaaaatgatcacttttgcaggctgcctcactcagatattttttttcattgcatttggatgcctggacaatttgctcctgaccatgacggcctatgaccgcttcgtggccatctgttaccccctgcactacacggtcatcatgaacccccggctctgtggactgctggttctggggtcctggtgcatcagtgtcatgggttccttgcttgagaccttgaccattttgaggctgtccttctgcacaaatatggaaattccgcactttttttgtgatccttccgaagtcctgaagctggcctgttctgacaccttcatcaataacatcgtgatgtattttgtgaccattgtcctgggtgtttttcctctctgtggaatcctattctcttattctcagattttctcctccgtcctaagagtatctgccagaggccagcacaaagccttttccacctgtggttcccacctctcagtggtcagcttgttctatggcactggccttggggtctatctcagttctgcagttacaccaccttctaggacaagtctggcagcctcggtgatgtacaccatggtcacccccatgctgaaccccttcatctacagcctgaggaacaaggacatgaaggggtcactggggagactcctcctcagggcaacgtctctcaaagaggggaccattgctaagctctcatgaattgcagtgaacacaatactgaggccagactggcctctttcagccaatatttcaacttctgtttttatgcatttttttgagacggagtcttgctctgtcgcccaggctggagtgcaatggcgtgatctcggctcactgcaacctccgcctcccaggttcaagcaattctcctgcctcagcctccttagcagctgggattacaggcatgcgccccaattcccggccaattgtttttatttttagtagagatggggtgtcaccatgttagtcaggctggtctcgaactcctgacctcatgatccacctgcctcggcctcccaaagtgctgggattacaggcatgagccaccgtgcccagccacttctttttttttttttcaagaaggagtctcactctgtcacccaggctgcagtgcaatggtgcgatctcggctcactgcaactgccgcctcccgggttcaagtggttctcctgcctcagcctcctgagtagctgggattacaggcacccgccaccatgcccagctagtttttgtatttttagtagagatggggttttgccatgttagtcaggctggtctggaactcctgacctcaggtaatctgcccgccttggcctcccaaagtgctgggattacaggcaatgagccaccgcaccctgccttcttttatacatattaaagcatctcttcccttgcatcttcctttggaacgtttcctgcccttgctactgctaataaagttatataggatcaccctttttgactttctaaccagtaatcttaactttgtatgaatacaacctggtgttttctctgttatctttagtaatgatttggattttgttttttgtttttgttttttgttttgttttttgtttttgtttgtgtttttgagacagtctccctctgtcgccctggctggagtgcagtggcgccatctcagctcactgcaacctccacctcccgggttgaagcaattcccctgcctcagccttctgagtagctggaactacaggcatgcaccaccatgtctggctaatttttgtatttttaatagagacagagtttcaccatgttggctaggctggtctcgaacttctgacctcaagtgatctgcctgcctcagcttcccaaagtgctgggattacaggcatgagccactatgcccggcctgatttgagttaaaaatatatgtatcaaatcttacatgttaaatatataccctcagaagcgatgagatatgtccctattttggacttgttgccctggaaactcatttacagagatgttttttgaggttacgtgaataaaaataactcaaagagtttcctcctttttttatctgattcactttcctttcagtcacaccaactttacttaacttttctactctttcacaatatgggttccttgaatttcagagcaatgtctcaccgatttttgcaatcacaatgcctagcacagttattggtaaggagttcatgtttacatgatatctgtcaaatggagtagaaaaatagatgggtggatggttaaatataaaataagatctggaccagaaaaatacaaattgattaatctgatgagaggttttggccaggcatggtgctgcatgcctgtagtttcagctactcaggaagctgaggcgggaggatggcttgaacccaggaggttaaggctgtagtgagctgtgattatgccactgtactccagcctgggtgacagagtgagactctgtttctaaataataataataattaattaagttgttgagctagaaacaaaattcaaggttattgatgttgatattaataacactttatataccagcacagtttaagagctttatatacattacctcatttaatttttccaataactcttttatgtgattagtattatttctcaaatttacaaataaaaacgtaagagcttatggtaagtaggtaattagctcaaagtaatgaatgtagcgacaaggttcaaatgcagggctgtatgaatcagacagctctcccaggcattatgttgtgttgctgtggagtcctaattagggaaaaggagtcaggctggcaagaccaagggaaagcaaaaagaagcagatagaagtctgcctttcttcatggtcccagacacaaagccctcctgtgcaaaacactcacaatcttcctgcactcagctatcaccagaccctcagctgatacaaaaattgcaagttagctcagtgcaaccttggcgttatcaatactgtacaaagccctcctcagcacacagcacaagcactgtcttataaaatccccagcaagcttttgtccttagcaatcaactcctccattgctggcctgcccattgcttccttgcaatgtattttcatactttctccaataaatctgcctttctttacctacaactgtgttggtaaattcttcttatcttccacaccaccagccccagacagtcgccactcacccatgacagttacctctagtcaaaccttctaataatatagttaaacctcaaaggaaccaggaattctctgacataaattcttacttctggaattatgctccccaaccaagaaatattctgtgtctgggggctgcagcctcagaaataaatgaaacccaagagtaagatttattttttcctttgatattttaatttgacttcctttgattgttcattaaaatgagcacatttttgtgctcgatcttttggtgttcgatgtttttatagtaactcttttttccagctttactgaggaataattgactaataaacattgtacttattcaaggtgtataatgatttgatatatgtatacattgtgtagtgatttacttgcattaatttttactaaattttgagtttacctccattgatctaatcttagactttttaaaattctagttcacttagtttttaaatttttattcttaatcattatggatacacaatagctgtacatatttatggggtacacataaattttttttttttttttttttttttgaggcagagtcttgctctgtcgcccaggctggagtgcagtggcgcaatctcggctcactgcaagctccgcctcccgggttcacgccattctcctgcctcagcctcctgagtagctgggactacaggcacccaccaccacgcccagctaactttttgtatttttagtagaaacggggtttcactgtgttagccaggatgttctcgatctcctgacctcgtgatccgcccgcctcagcctcccaaagtgctaggattacaggcgtgagccaccgcgcccagccacatatgaaatttttacacatacaatatatactgatcaaatcaatgtaattggggtatctatcgcttcaagtatttatcatttctttgcgttattaacattccaattccacttttttagttattttgaaatatacgataaattattgttaactatagtcaccctgttgtgctaccaaatactagattttgttccttctaactgtagttttgtagtcattaactatcccttctttatcctccctccctccttactgcccctcctagcttctggtaaccatcattctactctgtttccatgagttcagttttttttagctcccacatacaagtgagaacatgtaatgtgtttttctgtgcctggcttatttcttttgttgttgttgtttgggttttgcttttttttttttgagacggacttttgctcttggcacccaggttagagtgcaatggtgcgatctcggctcactgcaacccccacctcccgggttcaagccattctatctgcctcagcctcccgagtagctgggattacaggcagccaccaccacgtccggctaatttttttatttttcgtagagaccaggtttcatcatattgaccaggctggtcttgaactcctgacctcaggtgatctgcccgcctctgcctcccaaagtgctgggattataggcgtgagccaccaagcccggccgcctagcttatttcatttaacatcatatcctccagctccacccatgttgttgtaaatgataggatctctcattaatttttatgactgaatagtgctccattgtgtatatgtaacacattttctttatccattcatctgttgatgaacacttagttggattccaaatcttagctattgtgaatagtgctgaaacaaacatgagagtgtataaaagacatctcttttatgtatgtatttattaaatatttccacagctttccattcatcttttattatctttattgttttacttgcagctgtttaatatgtttgagtccatcagttatcttctcagttctcttcttttctctttcttccatctggatttctgctcagagggttaatctatctttttttctagaattctgctgctatttgacatttttcctccaacttcattctattatggtggttgatgttaagataggaatttaagttgattttgctccccaattaataaccaattatccaagtaccatttttaacgtccttccttccctcaatcaaaaaattgattttttttctttttccttttcttttttttttttttttttttttttttgaggtggagtttcactcttgtcacccaggctggaatgcaatggcgcaatctcagctcactgcaacttctgcctcccgggttcaagtgattctcctgcctcagcctcccaagtagctgggattacaggcgcccgccaccacactcagctaattgttgtatttttagtaaagacggggtttcaccatgttggccaggctggtctctaactcctgacctcgggtgatccacccgcctcagcctcccaaaaagtgctgggattataggcgagagccaccacggccggccccctcattgattttaatgtcacttctataatatagtagcttattttactgaatttgtttttcattatccagcagcattggtatacagtcatgccccacatgatgatgttttggcctaagacagaccacatatattatggtaaacccataagattataatggagctgaaaattttcttttctttttttttttttcttttttcgagacagagtcttgctctgtcgcccaggctggagtgcagtggcacaatctcagctcactgcaacctccgcctcctgggttcaagcaattgtctttcctcagcctccggaatagctgggattacagatgcccaccaccatgcttggctaatttttgtattctgagtagagacgaggtttcaccgtgttggccaggctgctctccaactcttgacctcatgatccacctgccttggcctcccaaagtgctgggattacaggtgtgagccactgcgcctggcccggagctgaaaattttctacagcctaatgacttcatagtcactgtacttcagaatgcaacacattactcacacgtttgtgtcaacaaatctactgttccacctgctgtataaaaggcaagcacatacaattatgtatatagtgcagaatacttgacaatgaaaataaacgactatgttactgatgtgtgtacttactatattatacttttttatcactattttaaaggttactccttctacttattaaaagaaaaagttaaccataaaacagcctcaagcatgtccttcagaagatattctaaaagaaggcattgttaatacaggagatggcaactccgtgcgtggtattgcccctgaagaccttccagtgggacaagatgtgaaggtagaagacagtaatactgatgatcctgaccctgtgtaggcctaggataatgcgtatgttacaaattttttaaacagaaaaaaaaaaccatatagaataagaatataaagaaaaaacatttttgtacagctgtacaatttatttaagctacccgttattacaaaacagtccaaaagtggttttttattgttgttgttgttctgtttgatttatttatctttttttttgagatggggtctggctctgtagctcaggcaggagtgcagtggcgcaatctcagcccactgcaacctccacctcctgggttcaagcgattcttcctgtctcagcctcctgagtagctgggattacaggtggccaccaccacacccggctcatttttgtattttcagtagagacagggtttcaccatgttggccaggctggtctcgaactcctgacctcaggtgatccgcccgtaatcccagcactttgggaggccagggctgcggatcacttgaggtcaggagtttgagaccagcctgaccaacatggcaaaactcccgtctctactacaaatacaaaaattagccaggcgtggtggtgggcacctataatctcagctactctggagactgaggcaggagaattgcttgaacctgagaggtgaaggttgcagtgagccgagatcttgccactgtactcaagcctgggtgacagaaagagactctgtctgaaaaaaaaaaaatatatatatatatatatatatacatatatatatatatatatatacacgtgtgtgtatatatatatacacgtgtgtatatatatacgtgtatatatagtgtatatatatatgtgtgtgtgtatatatacgtgtgtatatatatacgtgtatatatatacttgtgtgtgtgtgtgtgtgtgtgtatatatatatatatatctcattactgggagatataattgctttctactgaactgaaaacggccctgcgaggggcatttctactgaactgaaaactcacatctggtctctcctggactctgtcccatgcacctttgcttttgctgattttaatctttacccttcactgtaataaaccataactgtgagtatgatagcttttctgagttctacgagtctttttattttattttattattattattattttttgagactggtttcaaactcctggactcaagcaatcctcctgccttggcctctgaaagtgctgggattgtaggtgtgaatcaccacgcctgtcttgaattctatgagtctttccttttttttgaaacagagtctcactctgttaccaggctggagtgcagtggcgccaatctcagctcactgcaacctccgcctcccgggttcaagtgattctcctgcctcagcctcctgagtagctgagactacaggcgcctgccaccacgcctggctaattttttgtattttagtagagactgggtttccccatgttggccaggctggtctcgatctcctgacctcatgatctgcccgcctcagccttccaaagtgctgggattacaggcgggagccaccacgcccaaccctgaattctatgggcctttctagtgaattgctgaacctaaaggtggtcttgggggacccctgacacagagaccatggatattgttttatcaggagaaataatggtttttctttaccttcttcttccgccactctttgagaatgtgagaaacatgagttgaccactcttcttgttgaagctgaagcttcccttctccccaaacctaggagaaacgtttcttcccctcccttgctcacgccgtccttcaagccctcagcatatgctcagagagaaacagagaccttatatacctttcattcctgctcctttatttcacttttccctcccccctaaatgagtcaagcagaacgtgtgttcagcccacggtcagttgggcaacagatgtgtcaccaggactcccctccccagcccccttccctcctctctgggggggcagagctggaggcccctcacatagcactctcgttgcctccccgtccccgggatgcccccttctcctgtgccatgagggacttgtagggtttccccaggctggggagggtaagctcagcttcctgaagctccagctcccgctgagacaagtgctcgatgacggccgctccaattgagtcccccagtacgttggtcattgtgcgaagccggtcactggtacaggggagaaagaagctgccattaatgggggcttgaaaagcttcacagaaagagggtgcagcagaggggggtccctgtgccagggagtcagagggctcccattgcagtacaatccatgaccacatgtccccaagcaggttcttccccctctctgccctgtttctcctactaacaaacaggatggaccaggtctgagatgttcatgtttgatcttagatgtgatattttttaaaaaatgaggctgggtgtggtttacagaaaaaagatcatatcattaaaaagatatgatcccagcactttgggaggctgacaggcagaagaattgcttgagaccaggagttcaagaccagcctgggcaacatagcaagaccccgtctctacatagaataactttaaaacacagcctgggatggtagcatgtgcctgtagtcccagctacttgggaggctgagatggcagggtcacttgagcccagaacgtcaaggctgcagtgagctatgatcatgccactccactccagcctagatgacagaacaagaccctgtctctcaaaaaaaaagaaaatgaggcagggcgtggtggctcatgcttataatcccagcacaaggcgggcggatcacaaggtcaggagttggagaccggcctgaccaacatagtgaaaccctgtctctactaaaaatacaaaaaaaaaaaaaaaaaaaaaattagctgggcatggtggcatgcccagtagtaatcccagctactcgggaggctgaggcaggagaatcacttgaacctgggaggcagaggttgcagtgagctgagatcgagccactgcactccagcttgggtgacagagcaagactctgtctcacaaaaaaaaaaaaaaaaaaaaaaaaagaaagaaaagaaaaaaatgaacatctcatgcagacgattaagggttatgaactgaaaagcacatagaatccggaatggtaaaccagggcaggcctgagtcaatacaggtgtagactagggcaggctgaagattataaaattggaactcaggctcagctgacagctcccatgtgggaatgaaagtccaggcttcctttaatgtaaacctcctggttttgttgttgttgctggtttttgtttttgtttttgttttttgagatggtgtttcactcctgttgcccaggctggagtgcagtggtgcgatctcggctcactgcaacctccacctcccaggttcaagcgattctcctgtctcagcctcctgagtagctgagattataggcgcccaccactaggcccggctaatttttgatatttttagtagagatggggtttcaccatgttggccaggctggtcttgaactcctgacctcaggtgatctgcccacctcggcctcccaaagtgctgggattacaggcgtgagccaccacacccggcctgtttttgtgtttttgaaacagagtgttgctctgtcacacaggctggagtacagtcatgtgatcttgactcactgcagcctcaacctcccaggttcaagagttcctcccacctcagcctcccaagcagctgggactacaggtgcgccaccacacccagctaatttttgtattttttgtagagatgggacttgccatgttgcccaggctggtcttgaactcctgaactcaagcaatccacctgctttggcctcgcaaagtgctggaattacaggcacatgtcactgtgtcctacccgtaaacctcctgtttttaaaaattgagatttaaatatatatttgcagctgggagtagcagctcacatctgtagtcccaactacttgggaggctgaagcaagaggattgcttaagctaaggagttcaaggccagcctgggcaacacagcaaaacataatctcaaaaaaaaaaaaaataacaaatcccagcactttgggaggctgaggcaggtggatcacgaggtcaggagatcgagaccatcctggctaacatggtgaaaccccatctctactgaaaatacaaaaaaccaaaaaattagccaggcatggtggcgggcgcctgtaatcccagctacttgggaggctgaggcaggagaatggcgtgaacccaggaggcaatctcatctcactgctacctccacctcccaggttcaagcgattctcccacctcagcctcctgagcagctgggattacaggcacgtgccaccacgcccagctaattttgttttttgtttgtttgtatttttagtagagacaccgcacccggcctggatcaccttttggtgacttctacataaaacaggtaaaagaggagtttttctgcctgataggtaaagcccccattgcttgtctccaaccctacttcccaaagataactgtgggatttggggtccagaggccatggattggaggcctctccaaggcctccttttcacttgaaaattctggaccactgcatctttgctggaataaaagtccacaggtcgaggacgttgcaggggaaagcagtgtgtgcagaagcaggagcaccagggtccagcctagagaacactcacaggaaccagtccacggcaatgatgagcgtgatgtcttccgtgggcaagccgaccgacgtaagcacaatgaccatggtgaccagacccgcctgggggatgccagcagccccaacactggctgctgtggccgtgatgctgcagggggagggagaacatggggagcagatggagggaagaaggcgatgaggaagagagaggaaaaggacagagagaagggaagagatcagctccccaaggcattttaaattaaatacccaagccagacacagagagaaaaatactgcttgatgcctcgcctcgcctcgcctcacctcgatccccacccaccccgcccctcccctcctcgcctcaccttgcccctgcctcgcctcctctctctctctcccaggctgaagtgcagtggtgttatctcagctcactgcaactcactactcaatcccaccttaacctcctgagtagctgggaccacaggcacatgccacaacgcctggttaatttttagtagagatggggtttcaccatgttggccaggctggtctcgaactcctgaccacctcgaactcctgatccacccacctcggcctcccaaagtgccagaattacaggtgtgagccaccgcgcctgacagagcttacattctagtatgggaagcaggcaataaacaaaatgaataactaaaattcatactatatggagatagtactacacggggaaacagtgcctccttagcaagacccgatatgccattttaaacagggcttccctgaaaaagtaacgctgaagacctgaaggagatgacaatgttcactgttatttttataatgactaagttggaaccactggatgatgggacctataaatacaggaataaataaatgtatagagcctacaaatataagaatctatatacaagaacctcgggttatcaggatgcaccagccatgctttggaaaacactggacaaatggatctcccacgtgagagggaaactgacaggaacgtcttggcagctcctgacagcctcaggtggcaactttacctttcacctacctcatccggcattgggctcttcccacatcccgcttccaacatccgtgggctcctctgagctccagctgaggccccctcctccctccccaaccctcccagccaagctgatgaccgcttaagtctcacctgctggcaggtcctacccaagccccctcacctgatggttgtgatctgacccaggttgagctcgtagttgttaacttgagcaatgaagatggcagccagggcctcgtagagggcagtgccatccatgttgaccgtggcgcccacgggcaggacgaacctggtgatgcggcggtccacacccaggccctcctccaggcagcggaaggtgatgggcagcgttgccgagctgggggaaagagcccaggactgaggatggggcgtggcctggtgggggcggggctgggaacagggtgtggcctagtggggcagggcagagaatggggcgtggccgaagaaaggctggggaacagggcgtgacctagtggggtacggctgagaatgggtagggctgggtcacatgggcggggctgagaacaggggaggagtaggtgaggcggggctcagagcaggacgtggccaggtgaggaagagctgagaatagggcgtggcaaggcagggcggggctcagagcagggcatgggctgggcgtggcctgggcagaaatgagcccaaggagcgttccccttgagaacattgagcaggccaggtggggggctcctcaagatgcagaagacaagggtataacatttcagaggctgataactgtacaaaggaaaggagcaactcctcatgatacaggaagaaaacagcaatgagggtctcccaagctgaagatctcttcacccacttaaagccaatagctaaggccaatgactacacactagtttatggcagtagttcgttctacctatccatttccaaaaaggacaggaccaaaggtctgctgacttcagggagggcccctactccagactcccctgtttgcaccagcattgacctcagctgtgctaactttctctatccatctacccgccatgtcttatcggagaaaagtgacctaattgattggcgagtttagtcaaagaagtgggcatctcatttggggtaagtctgtccacaaggcgtgtgttctgtggtcagctttacatcatacggttggaatcctggactcataagagagtctctgggtgtccagctcagcggtgactatgtgagtttaattctaggatacagtgacatcagtcttacctagccatagaccaagaggcacattccctgaccagcgttatgggcaattttaaaaattatatttttgatcaggtgcagtggttcgtgcctgtaatcacagcactttgggagagcgagacgggcagatcacttgagctcaggagttcaagacaagccatagccaacatggcaaaaccccgtctctaccaaaaacaacaacaacaacaaaaaaaacttagccgggagggctaaaaaattagccgggaggactggaatcaggcacctgtgattccagctacttgggaggctgaggtgggaggatcacttgagcctgggaagtggaggttgcagtgagtggagatcacaccactgcactctagcctgggtgatagagtgaggcctcatgtcaaacgaaaaagaaaaagaaaaaaaagatatttttggccgggcgtggcggcttacacatgtaatcccagcactttgagaggccaaggtgggcagatcacatgaggccaggtgttcgagaccagcctggctaacatggcaaaaccccatctctactaaaaatacaaaaattagccaggtgtggtggtgcatgcctgtagtcccagctacttgggaggctgaggcaggagaatcacttgaacctaagaggcggagcttgcagtgagccaggattacaccactgcactccagcctgggtgacagagtgagactctgtctcaaaaaaaagaaaaaaaaaattcttccatctttttggctgttgtgctacttttcaaatttgtttttgaattgggatgatgctcttaattaatcccctaaaactacaaaagaagaagaggaggaggaagaggaggaagaagaaaaaggaggaagaggatgaaggggaagaagaaggaggaggagaaggaagaagcagcagccaagagatctcccagacaccatctcacaagtggagatgacaccctctgagctaggaaatgactgagctcatggggcatcctggaaccttccctcttaacctcaaaactggtacctggttctcctccacagaaagttaaaaaacaggaaaggagaaaaggagaccaggagagccagcccaggacaatgactggaccccaggtgttgacattatgagccctggacattgttggacgactcagaagaggtgtttaaggaatggagagggcaggtgccttaggagaggacatgaaggacaagaagtgcaaccaggaatggtgctggggtggggagcaaggccatacctggaagacgtgcccatagcggtgatgagggcttgtagcatgcccccaatgaaggggaaggggttccggtgagtgacgaggaagtagatgaggggaaggacaatgccggcatggaggaacaggcccacgatgacggtcagggtgtacatgcccagctgaccccccaggacggccatgtcttccatctccagaatcttcccagcaatcaggaacaggatgcccacaggtgcatacctgtgtgagggagccacatacctgtcagggctccctcctgacctcccttgcaggtctgaaggtggcatccccaaggctttgcccatatagggccctggagccacacaatacccatgatacggcaccctactccatcccagtcttccccgtacactaatgaatgccaccgggccccatgaatgaagcccacctcctcctcctcctgctcttccacatctccccaccatggtagaaaagttcctacaactccaggatatacaagctttcaggtctctcctgtacctactccccattcaagctctctcaatcctgccccaaataatcactaccttcagtttccttccttagacattgccaagacattccctgtctctggccttctaagcttcccttatcttctgcccccaactgtttgttccacatttgaaatgtgtatgcccctattctcttccctatcagtgcctgttatcactcattcaccagcctaagcatttccctctcaaaccacttgtcctatcaaaatcaccgatgtattcattcattccacagatattgactgagtacctactgagtaccaggcacatggctctcgtcctcaaagcacttacattctgttatggactaaatgtttatgtcccctccccactccaaccaaattcatatcttgagatcctaacccccaatgggatagtattgggaggtgattaggtcatgagggtagagccatcatgaatggaattagtgcccatataaaagacacaccagagagctccctccacccttctgtcattcgaagacacagcaagaagacgccttccatgaaccagaagacagccctcaccagacatggaatctgtgggtgccttgaacttagacttcccaccctccagagctgtgcgaaatacatttttgttctttaagccacaatgtctatggtatttttgttacagcagctgacatgaactaagacacattctaatggggaaagcaggaggtacacatagaaatgcactaattgcaaacttcaagtggtgataacagcaaaggagagtcactggatgggactgcttctgagcagatggtcagagagggcttttctgaagaggtgacatttaagctgagacttgcatgatgagaaggtaccctgtgtatctggaagaaatcattgcaggcacaatgcagactctgagatgggcatgcactaggagtgctggaggaccagagagaagaccaatgtggctggagtattgagtaaaaaggagaatagagaagatgaaagaagcaagttcatcaggggctcacctgtttccccccataatccagcccacgggtcaatcgagtgagtttctgccattggcaccatcatctcatttcgaggcttcaatggctactcctctttctttagaaattgaagtttatggctgggcatggtggctcatgcctgtaatcccagcactttgggaggccgaggagggcagatcacttgaggtcaggagttcgagaccagcctggccaacatggtgaaatcccatctctattaaaaataaaaaaattagtcaggtgtggtagtgcacacctgtagtcccagctactcgggaggctgaggcagaagaatcacttgaacccaggaggcagaggttgcagtgagctgagatcacatcactgcactccagcttgggcgacagagccagactgcatctcaaaaaaaaaaaaaaatttgaaatctactttggctcacattcatcgtggatgtgttggaggaggtggggacctcttgggaaggtggtacaatagcttgagtcaaaaatgaggatgcacggggcttctccagtcacatctgtgttctccaaactgggctcagagttagccctggggagtagttgctgagtcttctccaagtcaacatgactagatccacctctatgcttactctgagtaatccctctctcaacttcctcacctccatccttccacctcatcccctgcaaaattcctcagcccaagattaattgtgcatgatttcttaccccctacactcagccacctggcacatctggacatttcacccaatcatgccaatgacactgctataaattcattgttcccaattcagctgagccttcattattccttgttaactctctgcttatccttaataagctccccactcccattcctttcagatgcttttccaggccctcaacttggcctcaagttccttatatgaagaaagtaaaagttcgtcttcaaagtttcccttcttgttaaagaataaatcttaagtgttaaaaatagtttcttttaaagactaacttccttcaagcctccttactttatgctaataactctttgttaagccctatcctatgtaggtgttagacacgctcacaggcacatagtacattctacgtccttgtactttaaccaagatatctgtgctggatgtgctcacaggcatgtcccagcttgcagcctataccccttccttatttgggaatgttattacttttctaagtccttttgtaagcaacttcctcttttcctctgttttccattgcttttacctatttagaaaagttttaaattattagccagtcgggatttagtttagattgtaaagtctggctccagccaatggagacagacacagtagcagggacaaactgcataagggataaaaattgcttcttccctcctttgttcaggtgtgctcttgccattgttccatctgtgatgaacaccctttctgcagaagtaaaaattgccttgctgagataattaaatttatgtttgagtgctatttctttatggcactggggaacaagcattctgtttctaaataaacattttacatatgacactatacaactttccaattgtttgggatgatgtacaaagtcttctcccatttgggatctgacagccttgttaatatcttccaccaccactcccaacttaccccatgctctcaccttcctgaatgccccaccattctccaaacaacttaggtaccttcaagctttgcatgttctcttctctctgcctgaaatacgtctcccctctcactgtccagttgaagtcctactcacctgtcaagacgcagttaacaggtgaccttcttcatgactccctcttcaggaagcattcactgcgtacccctctactcactgcttccttctccaagttcccaacattttttaaatgttcctttactacagaacctaccaccttgtgttatattgatctacaatgtgtctgtctcccctaagattttgtgagcttgttgaggacaaggtatgagtgcactgtatctctgtactccagaggtcaagacaaagtctgcctgggaaaatgcctgctgagtgaataaagatatttctgaagtaataaaggaatctagagaaggaatgatggaaggaaggaaggaaggaagggattaacaactggatgaataagtaaggaaataagcaaatgaaacaagttagtagctgagtgaacaaatacgtgaacaaatgagtgaatgaagagaatacttgaataaatgaatgaaagaataacaaatgcatagatgaatgagtgagtccaagaatgaattagaatgaataaatgacttaactgagtaaataaacagatgaatccatcaatgatttaactaatgcatggatgagtttgtaaataaatttacgagtgaatgaatacatgagtgagttaactgatgcatggaagaatgaatagatgaataagaaaatgaatgaaccgatagaaaaatgagaatgaataagtgaataaattggtgaatgaagagatacatggggaagtaaatgggtgaataaatcactgcagaaaggtatgaatgaatgaatagtaactaaccaatgcataggagatgaataaatccctgtcacttgtgacaacacagatgaacctggaggacattatgctaattgaaataaccaagacacagaaagacaaataccacatgatctcacttatctgtggaatctaaacaatcaaactcacagaagcagggagtaaaatggtggttaccagggactcgcaggaaagggagattggggagatgttgatcaagggtacaaaatttcagttaaataggagaaataagttcaagagatctattggacaacatggtaggtatagttaaaaacaatgtattgtgtacttgcaaatcacaaagagagtagattttaagtggtctctccctttttttttttttttgagactgggtctcattctgtcacccaggcaaccacaactcactgcagcctctacatcccaggctcaatctgtcctcccgcctcagcctcccaagcagctgggactacagctgcatgccaccacacccagctaattttttttgtattttttgtggtcttgtcatgttgcccaggctggtctcaaattcctgggctcaagtgattctcccaccttggcctcccaaagtgctgagattataggcatgagccaccacaccctgcctagatcttaagtgttctcaccacaaaaaaataagcatgtgaggtaacgtctatgttagttagctcaactgaaccattccacaatgtagagatatttcaaaacattatgttgcacatgaaaatatatacagtttttatttgtcaattaaaaatacattaattttgcaaaataaataaatgaatgaccaaataaatccagaaaccaatgcatgaaagaataaatgtagctgaataaatgtcagtgaatggcttggtcaatgtattgaagaatgagtgaatgaacagataagcaagggagtgaacaagtgaacaaatcattgcagaaaagtgtgaatgaatgaatgagttagtgagttggccagtgatttaaccaatgcatagatgaatgaataaatgcatgaggaaatgagtaaatcaatgcattgaagcatgagtatagatgaataaatcactgaatgagtgatttcatcaatgcatagaagaatgagtgaatgaacagatgaacaaagcagtgaatgaatcattgcagaaggacatgaatgaatgaaagagtgagatattccatgaactaaccaatgcatagaagaatgaatgaatgaacagatgaacaaggaagtcaactagtgatgaaatcatcccagaaagacatgaatgaatgagttggtgagtgggtaagtgaatcacccaatacgtaaatgaatgaccaaaagtccccagcaagcccttcggcagcttccccacagcctgacttcccagctctggctccaccatcccgtgggcacagaccaggactcaccagataatgatgcccaccagcctcataatagcctcattgaggctgtcgaagaagtccctgaggactctgcccttgtgtttcatgccaccaatgaccagcccaaaggccacagagaagaccacgaggcccagggcgttgatgccattggcggagccaggcacgggtacagtctcctcaaagctcagcatctcctgcagggtacccaaggcccgagtgacattttccaggaagctggttccgttctccactgagaatggaggaggcatggaggcacccggctcagacccgttctctgtcctcaccatggtcctggttaccaccctcgtgctgtactgcgtcttgaactgaaatagagagagattgcgcccagattcaattcagcggatgcattagaatcgcctggagaaattccttgagaccactgattcccagttcccacaccctggaagatcgataagatcttcattatcgattatcactcattatcgactatcactcattcagcagatctgaatgagtgaatgaatgacttgaatagtgcatggaagaatgagcgaatgaatcagtaaacccattatgaaaaatcatatggagcttcctcaaaaaattaaaaatagaactaccggccgggcatggctcacgcctgtaatcccagcactttggaaggtcgaggcaggcggatcatgaggtcaggagtttgagaccatcctggccaacatggtgaaaccctgtctctactaaaaatacaaaaattagctgggtgtggcagtgcgtgcctgtagtcccagccacttgggaggctgaggcaggagaatcgcttgaacctgggaggcggaggttgcagtgagctgagatggtgccactgcactccaacctggcgacagagtgagactccatctcaaaaaaacaaaaaaaaattgaactaccataggaccagcaatcccactactgtatatatccaaaggaaatgaaatcagtatctcaaagagatatctgctctcccatgtttattgcagtactattcacaatagccaagatatgaaatcaacctaagtatccatcagtgaatgaatggatacagaacatgtggtatacatatacaatgaaatactattcagccttgaaaaaggaggggatcctgtcatttgtgacaagagggttgaacctggaaaacactgtgctacgtgaaataaaccaggcacagaaagacaaatattgcatgctctcacttatatgtgaaatttaaaagagttggactcatagaagcagaaaatagaatagtgcttaccagggactggggagcagggaaattggggagatgttggtaaaaggacacaaaatttcagctagacaagagcaataagttcaagagctctattatacaacatggtgactatagctaataacaatgtattgtgtatttgaaaatcaccagaagggtagattttaagtgtctttatctcaaaaaatgttaagtatataaggtaattgatatgttaataagcttgattgagccactccacaatgcagacatatttcaaaacatcatcatacctcataaatacatataatctttgtgtgaatttgaacataaataaattaaaaatattttttgaagaataagtgcctgaataaatgaatgaggaagtgaacaaccaatgtgtggaagtagtatagattctgaatttttcacaagctccctgagcaatgcttaaccagagttgagggcctctcccctcaaccatctgtggtcaaaatttctggaatctctacaccagccttgttgcctcctctagccctgtgctcaggaagtccttggcctaagtcctcttttttttttttttctttttttgatatggggtcttgctctgtcacccatgttggagtgcagtggtgtgaccactggagccttgatctcctgggttcaagcaatcctcccacctcagcctcccaagtagctgagacaggcgtgtccagctaatttttttttaatctttttttttttttgaaagacagagagtctcattctgttgcccaggctggtcttgaacttttggcctcaagtgatcctcccaccttggcctccctaagtgctgggattacaagcctgatccaccattctcggacctaagtgcttctccctaacccccccagatcaccatggaaaatacatcctttctcctagactcctcaagaacccctgcccattgctctgtcaggcccttcctcccgcctcttgcccttggaccatcccttcagccccaagctcccaccaccctccgaatctccttgatcaaactgtgtacttccccctgacctgtttgaagcaggcctccacaaggtttggtggaaacatatttctgcagaaaaacatgagaagaaggaaagtggttagaccatggaagggcatctagggtgataacagtaatactaacaccaagaacaacaatagtgcagccaacatatgaatgcttcctctaggctgggcactgagcaagcatcttactatcatctgattaaaacactacaataaccctagacatgagtcctattgaatgccgcctttcacatagaaagaaaccacagcccagagaattgatgtaagctacccggagccacagagctgctaagaggtgcagatggccctcaaatccaggtctgtctgagcatgtggccagagccctacatcacctcaaggactttaattcaaacacacatgtgtcagtgatgcctcaaaaaaccacagaaaactcttaaacccttttaactttaggtttcgtctaggcccatgattaaggtagaaccatggctagccttgattctgtgtggcaaaaatcttgctgctttaattaaaattaaaaccacaatgagataaccaccttaaccccagctagaacagccatcattaaagagtcaaaaaactatagatgttggcattgatgtgggggaaaggggacacttacacactgctggtggggatgtaaattagtacaacctctatggaaaacagtatggagatttctttttttttttttttagatggagtcttgctctgtcgcccaggctggagtgcagtggtgcgatctcggctcactgcaacctccacctcccgggttcaagcaattctcctgcctcagcctcccaagtagctgggattaaagttgcccaccaccacgcctggctaattttttgtatttttagtagagacagggtttcaccatgttaggcaggatggtctcaatctcctgacctcatgatctgcctgcctcagcctcccaaagtactgggactacaggcgtgagccactgcgcctggctgagagatttcttaaagaactaaaagtagatctaccattccacctagcaatcccactactgggtatctactcaaaggaaaagaagtcactatatcaaaaagacacctgcacacatatgtttatcacagtacaattcacagttgcaaagaaatggaaccaacctaagtgcccatcaactgatgagtgcataaagaacacatgatatatgtacaccatggaatactactcagccatgaaaaagaatgaaataggctgggtgcagtggcttacacctgtaatcccagcactttggaaggctgagatgagtggatcactcgaggccaggagtttgagaccagcctggccaacatgatgaaacgctgtctctactaaaaatacaaaaattagctgggcatggtggcaggcacctctaatcccagctactcaggaggctgacacaggagaatcgcttgaacccgaaaggcagaggttgcagtgagctgagatcatgccactgcactccagcctgggcgacagagtgagactctgtttcaaaaaaaaaaaaaaaaagaaagaaataatgtctttggcatggttggagctgggggccattattctaagtgaagtaattcaggaatggaaaaccacatacagtatttctcacttataagtgggaactaagctatgagtatgcagaaacatacagagtgatataatggactttagaaactcagaagcgggaggcggggagagtagttagaaattaaaagctgcacattaggtacaatgtacactactagtgggacggatgcactaaaatctcagaattctccactatataattcatccatgtaacaaagaaacacttgctccccaaaagctattgaaattaaaaattaaaaaatttttcataggccgggcacagtggctcacgtctgtaatctcagcagtttaagaggctgaggcaggtagattacttgaggtcagcagttcaagaccagcctggccaacacggtgaaaccctgtctccactaaaaatacaaaaattagtccagtgtggtggcgtgcacctgtaattccagctactctggaggctgaggcacaacagaaccctggaggcggaggttgcagtgagccaagctcatgccactgcactccagcctgggcaatggagtgcaaaaataaaaataaaaacaattaaaagagtaaaggcaactattaatagcaaaaatattttttaataataaaaataaaaaatcaaaaatttagttaattttttaaaaaatcgtgctgcttctatttacaatagcaaagacttggaactgacccaaatgcccatcagtgatagactggataaagaaaatatggcacatatatgccatgcaaatactatgcagccataaaaaagaatgagttcatgtcctttgcagggacgtggatgaagctggaagccatcattctcagcaaactgacatagaaacagaaaactaaacactgcatgttctcactcataagtgggagttgaacaatgagaatacatggacacagggaagggaacatcacaccctggggccttttgggggctgtgggggcaaagggagggggagcattaggacaaatacctaatgcatgcggggcttaaaacctagatgacgggttgataggtgctgcaaaccaccatggcgcatgtatacttatgtaagaaacctgcacgttctgcacatgtatcccagaacttaaagtaaaaaataaaataaaatataaattaaaaaatcatgctgctctaagagaatcattcaccctccaatgatgcttaggcaaataccagctgttctgaccccaccttaagggtcatatcctaagatcatattctagcagcagctgctgttggagaatatatacaaggctccagggcagaaattgggtaccacaagtggatactatgggtgctgctatgtccaggctgcgggagcctgtcccctttgtctctccttcagtatgagttgttgcaagtagagtcagaaatcatatcaaaatgagtacagtcacctgtaaactaaaagtaacacctaagccaccaccaccaccaacagctgaacagactctcttgtggccaagtggaccccagaacaactttaaaactgagttcctggccatgatgggacaggaggtcagacacgcctccttacactctctcccttttataatctagacacaacaactaacccacattaatgttattaatgcattaaattaaaacagaaatcataagactgatagaacaggctctttggggcaataagataccaaattataaggaggatctaagaccatgccacgcaggggttaagtcatggaccctacgctcaaagaataaattgtgttctagctgtcaaaaggttcttctttttctctaggagttaaacaaacactagtcttatgataagcaatattaaaataattacaactcatcagctcacagacaaggactaatggggcccctgttccaccagccataactacagctttgattggacaagagactgatttcagtaactttctcctgataacaccactgaccatgggctggttctggctcattgacagaggctgtgcatttgggtaccttcgtgtcctgaaaagaccttttgatgtataaagcctaaatgtgatacatttaaatgttaagtaaatgttaagtatccaccccaaagtggacatggggtcatatgttacatgcaactttcttcaatatgcatgcatcagggccacctacatgaatattcatagctcctcctgtaacctgttgaatatgcatgtttagccaacccattcagcataaagctcctactccaacccctcctccttagaagtgcccgtctctgctcttgaccggacgcatgcttcccagcctgtgggatgacctctttgcaggctataatcttttacaataaataaagtctcctttttcaaatgtgtatattgtggttttttaggttggcacacctgatcaggtccatgaaggcatcagctgtggggatggtctcgatccggccctcccggtgcagcccctccttggagcccttcccgggatggatgatggtgaccatgaggatgccgatgaagaccgcgatgatggtggtcaccatgtagtacacagctgcccgcatccccatccgccccgtggccttgttgtccagggatgccatacctgaaggacagatgatgtggcccccgcagctccatgcatacccaacgccagctctcctagcatccgttccaccctccccatatcaccaactcaacagccgacccaccaagcatcccttttcctatagcccaccccaaaacccacccattacccattcacccgcaccaccatctttctacttctaattttccaaatacacaccctcacacgccatcccaacccttatcccaagcagcactccactatcctactgccttccctctactccaagccaccttttccacactttcaccccatcctctattgagtcttgttttctcttgttttgcaccataacctaactattttttttttgagacggactctccttcgcccagactggagtgcaatggtgcgatctcagctcagtacaacctccatctccccagttcaaacaattctgctgcctcagccttccgagtggctgggattacaggcacctgccaccatgcccagctaatttttgtatttttagtagagacggggtttcaccatgttggccaggctggtctcgaactcctgaactcagacgatccactcacctcagccttccaaagtgctgggattacaggcatgagccactgcgcctggcccataacctaactttcattccacttgtcatcccactattaatcccaaaatcacaccttcctccaacccacctcacggcgcaccctttgtggcacatattcttggtgctccactcctacaccctttcccaagccaatctgctgatccttcagccccgagagcactgagtacaatagctcaggctgcccacttctcctgagaattgccctcagcaaaatgggagctgccttgcccatagaaaccccaggggagacctagagccaaagaatgactgtgcagggattcacaatggccaactcctttgattcaggtggcagtagagctggggagggattcaattctgtggttctgctcacactccagagctccccatgagatgaggctgagaggccagccttcttttgaaacccacatctttgcttcactggtttcccagccctgtcccacttccttcacttccttgcgagtttctcttgagagctatcccgcaataaatcacctgtgcagatatccccatctcagtcaggctctgcttctaggaaacccaacctaagaagccatttcttcatgcctttttcttcttccccatccccaaatccagggattggcaaactgctactcatgccaaatccggccctctgcctgcttttgtaaataaagttttattggaacacaaccatgcccatttgttctcatattgtctatggctgcttctgtgctgcaatggcagaatcgagtacaattgacccttgaacagcatgggtttcaactgctcgagtacacttatgcatggagtttcttctgcctgtgccacccctgagacagcaagacaagccctcctcttcttcttcctcagcctactcaacatgaagacaaaggggatgaagatctttatgatgatccacttccactcaattaatagtagataacatttctcttccttatcatttttttaatagacagggtctcaccctgttgctcaggctagagtgcagtggtgccatcacagctcgctgcagcctcctgggttcaagtgatcctcctgcttcagcctctcgagtagctaggactatgggcatgtatcaccatatcctgctgattttttttattttatatagagatggagtctcactgtgttgcccaggctgatctcgaactcctgggctcaagcaattctcctgcctcaacctcccaaagcactgtgattacaggcataagtcacctcacctggcctgattttcttaataacattctattctctagcttactgtactttaagaatatagtataatggccgggcggggtggctcacacctgtaatcccagcactttgggaggccaaggcgggcggatcacgaggtcaggagatcgagaccatcctggctagcacggtgaaaccctgtctctactaaaaatacaaaaaattagccgggcatggtggcgggtgcctgtagttccagctactcaggaggctgaggcaggagaatggcatgaacccaggaggcggtgcttgcagtgagcggagattgtgccactgcactccagcctgggcaacggagcgacactctgtctcaaaaaaaaaaagaatatagtatataatacttacagcatacaaaatatgagttagtcaactgtttatgctctctgtaaggcttccagtcaatagtaggctattagtagttaagcttttcgggagtcaaaagttacatgtgagccgggcgtggtggctcatgcctgctatcccagcactttgggaggccgaggtgcgcagatcatgaggtcaggaaatcgatatcatcctgaccaatatggtgaaaccccaactctactaaaatacaaaaaattagctgggcgtgttggtgcgtgcctgtagtcccagctactcgggaggctgaagtggaggaattgcttgaacctgggaggtggagattgcagtgagccaagatggtgccactgcaccccagcctggtaacagagcaagattttgttaaaaacaaaagaaaacaaaacagttatatgtggattttttactgtgtgggggttggtgcccctaacacccaaattgttcaagggtcaaccctagttgcaaaagagaccatatggcccttgaagctgaaaatgtttactatccagccctctaaagcaaaagtttgtggacccctgcataagccaaccatactcccatcccaccctctacccactaagctgtcacctccatctcactcaccttccacaccttaatcgacaccccactccctgcacatccataccatagcccagccaccctccctggttgcccttccaagactttctctcacttctttgtgatactaagccccttgcaggctggcattttacctccaaggaaaaggacaggaagcctactgagatgagtggtgtggggtcatatggggtctggaacctgggaccgattgggacctgggctttgtttggccaaggacgctggaccagacacaggctccatgtttgaggtgccgcgtcaaggaagtggtcccatgcttgggatggccttggctctgggttcaagctgaggctctagacgggtcttggaggccaacactggcctgggctctctcacctgtgaccaggctggagacaatgagaggtaacaccagcatctgcagcatcctcatcagaagctctccaggaaaagagaagtacttgatctggcggtaggtgagctgatatgggcgcagggcaaaggccaggctgacccctagggccaaaagaaggggtccatggactgaagtctgggtcgctcagccccaggcagggtccatccatcccaagaagggtagggcaagggtgggagtgagggagagaaatatcctatgagtgtgtgtatttgtgtgtgcactgatgtgtgcagacattgtagaaatgtatgcatgtatgggttaccatattgatattgtgtaaatgtgtgtccgtgtctgtgcaaatgtaaatgtgtaaatgtgtgtgtatatatccaggatatgtgacggtagacattcacttgtgaacaggtataggtgtctgtatacaggggcatatacacatgaatctgcacaggtgttttcctggacatctataggtgtgatttgtgtgtatcttactattttcaaacatgggagtgtacgtgttcttaagctcataagtgtgtgcacgtgtactcaagagaatgcatgtagagatgtgaatgtgtttataagttccaacatacatgcacaagtgtgcatgtttgtgtttgcacctataagttcaatgcacgcatatgtgtgtgtgcatagtaaagtgtttgtacattgtatatgtatatatgtgagtgtgtgtgtacacatggatatgcatgtaacattgtgtgcacacacagttgtgtttgcacacatgtgtattcatctgtgtggtgtgtctttatgtggggggttgagggtgactggtgggactgggacgtgtgtgcaggtgagaatgaaggggtgcagcaaagagatgtgtagaggccaggaatttccctgaagtccccgcctttccctgaagtccccgccctccaagaggcagagctcaccaatgaccacggcgctgaccgtcagcagaatgaaggcgtttcggcgcaggaagcgcagcacgtgctcgagggtcatggtctgcaggcgcaggcgcgtgcgcagtgctctctgctgcaggctttcctgcagccgctgcagccagcccacccggcccagccgctggccgctctcccgcaggaacaggctgttgccatggctgctcatggtctatctgcgggaaacagagaagcctggggctggtgagggccaggacagaaggccggcgtgggcagatggcgaaggctgcgaagggtaatgagcgcttcctgaggactctcagaaggcgggggtggctgggtgttttggctcacgcctgtaatcccagcactttgggaggcagaggcaggagaatcacttgcgcccaggagttcaagactggcctgggcagctaggggtggtagtcctaaatatttgggaggctgaggcaggaggatcacttgagcccaagagttcaaggttacagtgatctatgatcttcccagcctgagcaagatagtgagacctccacccctccaaaaaagcacaaaggccaggcgcagtggcccacacctgtaatcccaacactttctaaggccaaggcaagaggatcgcttgagcccagaagtttgaggctgcagtgagctgtgactgcaccactgcactccagcctgagtgacagagcacagccctgtctctaagaacaacaagtaaataaaaatataactaaaaacaaaatggcaggggagggggaaggtaagtctgttgcgatgtgcccggttctaaggacaggtcttggcaggaaaacgtcaagtctccagaatcattcctgagaatggctgggaagaggaggaaaccacaaaaataatggacctttttgacacaccctgactccagcccactcttatttcactgagatcatcacaagcctctgggggctgccccagtggctcaagggaaattaacaagcctttgtgaagtgccagctgcatacggagccctagacaaagcacccggaggctagtcccccaaattaggacggttttgtgtccagcctggaggcttttcacaaggacaaaatcagcaggtgcctggcaaacagcaggtgcccagtaaatgcagctattctgcctgaatgcccaggtgagcaacagggagagcggggagtcaggagagcggggagtcccttgggaatgaaatgataatgattcttggccacagtgtgatgttcatgagcccctctggggtggcaggcactgtactgatgtttcccaaactgcaggcttttgcgtctcctctttatatttggccatatccatgtgtccttattcacttacctaaaaaacagtaccgaaccaggcgtggtggctcacgcctataatcccagcactttgggaggccgaagcgggcagatcacttgagctcaggagttcgagaccagcctggccaacacagtgaaacaccgcctctactaaaaatacaaaaattacccaggcgtggtggcaggtgcctgtagtcccaactactcgggaggctgaggcaagagaatcacttgaatccaggaggtggaggttgcagtgaaccgagatcgcaccacagcactccagcctggacgacagagtgagactctgtctcaaaataaaaataaataaatacttttaaaattaaaattaaaaatgtatctaaaatggaaactttagacccctacttgaaatgtgaattatatttttcatcaacattaaataaaatgcatataaaaattaaaacttgcccatctgtctaccaactaaacacctcacgtgtacagggcggctcagaaattgtgattttcatgggcctgaggaacttttctctttgtgcaccccttccttcattaaaaaaaagcctacattaaaattctatttcacaactgcattcatataaagaaaaatatgttatttcagaacgagatagaggtgacaattattgcacaacataatgaaaatactagatgctattgaattatatgttttcaaatggttgcttttgtgttatgtgaattcccctcaattttaaaaattgagccagctgctgtggctcatgcctgtaatcccagctacttgggtggctgagtggggaggatcacctgagcccaggagttcaagacctgagacagaatgtcgctctgtcaaccaggcaggagtgcagctcactgcagcctccaactcctgggctcaagtgatcctcccacctcagcctccaaaagtgctgggattgtaggcatgagacaccgcacccaccctaaaaaaattaaaaattaaaatgaatatgttaatattctacattataacattctttcacctaaatgcttgtttctgtcttctgattttgaaagagatgaaaacatcagggaaatagtagaattgtattagaggctgggaagggtaggcgggaggagaggatggggagaggttggttaacagatacaaaactacagctagatagaaagaatgagttctggtgttctgcagcaccgtagagggactatggttaatgatcatttattctatattttccaaaaagccagtagagaaggttctgagcattcacacattaagaaatgatcaatgtttgagatgatggatgtgctaattaccctgatttgatctttacgcattgtatgcatgtatcgaaatgtcactgtatcccatcaatatgtacaagtattttgtatcaactcaaaataaaagggaagcaaaaaaaatgaaaacggccagggcgcagtggctcacatctgtaatcccagcaatttggaaggccgaggtgggcagatcacttgaggtcaggagttcgagaccagcctggccaacatggcgaaaccccatctctatgaaaaatacaaaaattagctggatgtgtcacacgcctgtaatcccagctactccagaggctgaggcaggagaatcgctttgaacccaggaggcagaggttgcagtgagccaagattgcaccactgtactccagcctgggtgacaaagccagactttgtcaaaaaaaaaaaaaaaggaaaaaaaaaaaagaaagaaaggagggaagggaacggaagggaagggaaggggacaaagggaagggaagggaaggggacaaagggaagggaagggaagggaaggaaagggaagggaagggaagggaaggaaagggaagggggaagggaaggaaagggaaggggacttttctgtgggtccctaaaagcactgtgtgctataggtactatacctcctaacctacactgttctcataaccaagaaagggtggtgcccttcttccaggcatactgagaattctgttcttccttctagacccactcttaggctccctctcccatgggctccctttcgatctacccagtggaaaggacaacagtatggagatttctcaaagaactccatcccatccagaaacctccctactgaatatccaccccaaggaaaacaaatcattgtatcaaaaggatatctgcactggcatgtttcatcacagcaatattcgcaatcgcctagatatggaatcaacctaagtgtccaccaatggacgattaaagaaaatgtgatatagataagtttatcatattatagataaatagatctgtatcacatttatatcaatatcacattttcttgctacattgttgattacagtattttatctatgtttcattatgtatatcatggaatagtaatcagccataataaagtgtcttttacagcaacacacatacaactggaggccattctcttaagtgcaataattcagaagcaaagtgtaataccacatgtttacttatttttagtatttttgtatttttagtagagacggggtttcactgttggccaggctggtctcgaactcctgacctcaggtgattcacccacctcggcctcccaaagtgctgggattacaggtatgagccacagcgcccggctgccccccatctacttcctaagggatcaaggctccctgatattttttctcacccgcaccccagccacacccccagtacctgaattcaaccaggtcgagctgcaggtttcttggaggtctcagttttaccagtacgtaggtccctggcctttgtgttttgctgccactggcttttctgggatcttccttgccctcctcaactccccaccatatccaagggatgggaaatctgccctgattttccagatcctgcgtcctctagagctaatccaaattcccaatgccaagccccacttaggatcctgctccaaatggacccatctcctgaaaccacaatgctgcttctccttgctgtgaaaaaaaaaaaaaaaaaaaatcccaaagagtgaaccacagactacacagggaatccctctgggatattatgtttccagtccctaagccacagcaggaagttgcctgtagataccaagggagatcattcagctaagatctgaacagtcaggaaaactcccgaggctagagttttgtccggttcctttctcttccttacaagacataatacggtattgacaaactatggtctgctagtcaaattcagcctactgcttgtttttgtaaataaagttttattggcacacagccacactcatgcattacctattgtctacagctgctttcaagctacaatgcctgagttgagttgttgggacagagattgtacgggccacaaagctcaaaatgtttactcttgggccatttgctgaaaaaatttgctgacccctggagaagagcagacagcacttagcatctgtgggccagacgcagtggctcatgcctgcaatcccaacactttgggaggtgaaggctggagaaccgcttgagcccaggagttcatggccagcctgggcaacatagccagaccctgtctcttttttaaaaattaaaaattagccaggcacggtggcctgtgcctgtagtcctagccactcaagaggctaaagcaggaggatcgcttgaacccaggagtttgaggctgcaatgagctatgatcgtaccactgcactccaacttgggtgacagcgtaaaaccctgtctaaaagaaaagaaaacagcatcttagcacctgatgaccataaaatagttgccaactgtggttgataaaaagcagaaacctaactcacacaaaattaagaatagagtaaaatgctacagtgtgagaatgtcttactatcaatttttctcagtcctgtctgcatcacttataagtatataccatcatgattgtcaattaataataatactagttttaaaaaatgtttgacttgaaatgtgatcttagactccacttgggcctctctgggtctctctcttctcccccaccctgggctctctcttttctaggctttcctgggtctaggctttcttttggacctacctcttgggtttcctgctcagaaaatgtcccttctagtgttcccagtttctacagggtgaggggtgagggtgggtctttcccacttggttctcccgacctctagacacttagatctgatgagatgtgtgggctgcttctcggagcctcttacatccctaaaactaaagcaagctacagtgagcaaactgaaaatgctttctgtacattttatgtcaatgctatgctagccagaggagtgagtgagggaagagagagacggcatggaaaccaagtacatcacacacactcagacacacacacgcacacataacctcgaaaacctcttgtatgcaattgacatatccacaaccccagacagacacagtcacatgcaaactcttcagacatgcaaccacacacacacccacacaaaccttcagaaatgcagctccatgcatgcagtcatacaatccctacacacacacacttcccacattcatgtacaccctcaggcacacaaccacacaccttcagaaatgcaattccaggcacacagttgtacaattctgcacacagacacactcacacatacacttgccacattcatgtacaccctcaggcacgcaaccacccacaccttcagaaatgcaattccaggcatgcagtcatacaattctgcacacacacatacacattcatgtacaccctcaggcacacaaccacacacaccttcgtggctctgcacaactacccttcatgaattaaatcttacagaggcagtgacagccatacaattcctacctacacacagaaacacacacacacacactctttagggcacaaaacacaaacttcagactttcaaaatcatcctcacatttaaacattcagctccacacacctgttcaggacggcgatcccactcacaaattcagtctctctctctctctgtcacacacacacacacacacacacacacacacacacacacacacacactaatgcccagaccctctgcagcctcagccacatcagatacatctgaaattggtgaaataagccctctgacagagaaggcaaccgagccctataaatgcacaaggcatcgggctcggtgctggaaacgtgcctgtgtgcggaggccacgggttggggaggtggggagacgggcagggagacccggggataactaaggggataggaaactcaccagaacgaccaggagaaaagcggtggcaacggctctaaggggcaagcaggagctcagagacaaagggcggcggagaagtggggacgtgggcgcagggagcgccccacacgcctgaccccagcgcctcggatcccccacctgcccgcaacctccgcgccgcagccacaccgagtccccgcgccgagccgcggagtccccactcaccggcgtccggagcggcgggggcggcctgcccgcgcctcggcctgcgcgctgcgcccggatgcaggagccggagcccggcgaagcgcccggccggggccgcggggacccgccagggactgtgcagcaccggcgcggggaccggaccgtggaggcaccggcgcggagccgggacgcgctatgctgcgggagggatccgggccggccctgcgctcacgtgggtgtgggggcaccgagcggccgggggagggggcgggatcccctccgcgatgccctccgcctcccccgcgcccagcccaggctccgcagccgtgtgggagaagggggacagcgtgcttgcgaagggagggggactgggggtgggcgggggtgagtggcctctccggcatccagcccccgccccctgctcggagccgcgcctccgcgcccccgccccctaaaccgcctccggagccctcggaggccccagcatccctggcggagcgcggggaacaggccctggcaccgcgggacccgctccagcagcctcggcggaggcctggggaaggcgcggctctagtgtcccagtaacaacagccagggagagggctccgctgcccccttctccttgcgggtgcaccttccggccttggccacttggctgctgtgtgcccttgggccaactcctctccctctctgagcctggcttcctccgctaaacaaggaagatggcttggccgaccccacagaaaattaaagctgagaaaattaaagcgcgtgaggctggaaatgctccgtgccagcgcgaagcactgggcaaatgggagatggataatgtcgttcctattgtaattaatattattctttgctgtctttagagcacaccaggcaaggtgcactcgacttttcttctcgaaaggcaatgacttggttgcttcccacatcttctgcctctcctgagagctaatgccatttaaagatctgagcatcaggtctgtcgtatgaataaaaactcagtgcaggctgggcacggtggctcacgcctgtaatcccagcactttgggaggccgaggcgggaggatcacttgaacacaggaggcggaggttgcagtgagccgagatcgcaccactgctctccagcctgggtgacagagcgagactccgtcaaaaaaaaaaaaaaaaagtcagtgcacgttcaatgttttttattattgttgttgttgttgatgaagtgttgatggcgacctcctgaactaggcaggctcttttattaatacttatatttaatctacacactcctataaagtatatatcacttcctctattttcagggcggggacaggtgctcagaaaggttcaataacttgtccaaggtcacacagccaggaaacagatgccccaattctaattctttgcatgcatcgccctggctctgcttctttgcaacaactcctagataggtgattctcaaacttagctgtattttaaaactacctggagaggttttaaaaattctgaagccagcctgacatagtggcccatgcatgtaatcccagcacattgggacgccaaggagagaggatcacttgagcccaggagttcaagatcagcctgggcaacatagcaagactctgtctctatttaaaaaaaaaaaatcaaaaaattagctgggcacacacctgtagtcccagttactcaggaggctgaggcaggagggtcacttgagcttaggaatttgaggttacagtgagctatgattgtgccactgcacttcagcctggacaacagagcaagaccttgtctaaaaaaaaaaaaaggaaagaaaagaaaagatatctgatgcccaagccacaccctataccaagcacatcagcatacctggaagtgggacccaggcatcagtatatttgaatgctccccaatgtatggctaaggctgaatctctgtcctagatgtcagattcccctggaccacattggcaacccctctctgcagccttctcactccgctgcttcagtcactcactgtgcttagacgattctgcatccttcttgaacctagagctgcccctgaactcctgcctcttacggtcattcactccacaaatacttactgtgcacttggatgtgctagaggctggagactcagcagcgaagacaacagagccctcggtctgtcacgcaaaataataagtaaataaaatagcagttgttccctggcaattggccttgcaagccctttacacccgtaacaatcagggaggatcccaaagaaaccataactcaagcctaagcatgagaaaaacatcagactaatttcaatagagaggcatccgataatctacctgcgcagtcctcttcaaaacagtcattaaaaattaaggaacatgtggagcagggtttggtggcaggtgcctgtagtcccagatactcaggaggctgatgcaggaggaccgcttgagtccaagaggttgaatctgggaccgcttgagtccaagaggttgagtttgcagtgaactatgattgtgccacagcactccagcctgggcaacagagcgagaccctgtctctaaaaaaaaaaataaaatttaaaaatgagaaaacaaggaatgtctgagaaactgtcacagccgagaggagtctaagaagatatgacaacaaaacgtaatgtgagatcctagaaaagaaaaaggatataaggaaaaaattaggaaatctgaatagagtatgggctttcgctaataataatgtatccatattggccgggcatggtggcacacacctgtaatcccagccctttggaaggccgaggtgggcaaatcactagaggtcaggagttcgagaccagcctggccaacctggtgaaaccccgtatctactaaaaatataaaattagccaggcatggtggcgggtgcctgtaatcccagctactcgggaggctgaggcaagagaattacttgaaccccggaggcagagtttgcagtgagccaaggtcgtgccactgcactccagcctgggcaacagggtaagactctgtttcaaaaaaagttatctgtaacaataacattttgttaataatgtatcaatataataatatatcaatattacaatatggtaattatacaaatgtgccatactaatgaaatatattaataacaagtgaaactaagtcaagggagcatatgggagctgtctgtactatcttttcattttttatgtaaatctaaaactgttctcagaaactgtgtcttaatttaaaaagatcctgggagatcccaaagagcttttctttatataggttatagctattgatctttacagtatcagaaattaaaactgaaaaagtgtttcaacatttattcattttaacataacaaaaataaacctactacatgttaacataaaatagcatatttttacgaaaaataactgtattttccaaaacaagaacaaaaaaagaagagtgacattgttttacactttttcaaattgctttaatggctaccttcatcaaaaggaaacggaatttttatacagttgattttcattattcacggattctgtatttgcaaagtcactcactcactaacatgtatttgtgaccccaaaattaatacttgcggagattctgacatttttctgggtcatttgcagagagattaacattttgagctgcacggcgtgaacatttgtagctgaggtgcaaaagaaccatgctctgttatcttgtttcagctcatacagtgaacaagcatcctatttgtggcctgtttagtgccatacttttctaactttcatgttttttgttgatttcgctgtttaaaatggtcctgagcactttgctgaagtgctgtctagcgtttctaagctgaagtgctcagtgtgtttctaagctctagaaggttgtggggtagctgggtgtggtggctcacacttgcaatcccagccgcgctttgggaagccaagacaggaggattacttgagcccaggagtttgagaccagcctgagcaacatattgagactcccccatctccacaaaaaattttaaaatgagccaggtatggggggcgtgcctgtggtcccagctactcaggaggctgaggcgggaggatcgcttgagcctggaaggttgatgctgcagtgacctatgatcgtaccactgcactcctgcctgggcgacagagcaagattttagctctaaaaaacaacaacaacaagaacaacaacaccaaaaaaaaaaaaaaaaaaaaaaaggctgtaaggctgtaaggctgtgacgtgccttacagagacaatatgtatgttaggtaagctatgctcagacataacttctagtactgttggccatgagctcaatgttaatgaatcagcaacatatattaaatatggagtctttaaacaaaaacacaaataaaacaaagtatatatcagttgacaaaaatgttgtgaccaggtgcttacagaaactaaatcttgtacttccccctggaagcagtgatttagtatttgctacttcagtgttcaaagcaactttatagggctgggtgcggtggctcatgcctgtaatctcagcagtttgggaggctgaggcgggcggatcatctgaggtcaggagtttgagaccagcctgacaaatatggagaaaccccgtctctactaaaaatacaaaattagccaggtatggtggcgcttgcctgtagtcacagctacttgggaggctgaggcaggagaatcacttgaacccaggaggcggaagttgcagtgagctgacatcgcaccattgtggtgagccgagatcgtgccattgccctccagcctgggcaacaagagcaaagctccatctctaaaataaaaaacaaaaaaaaaagcaacttcatagaatataactaccatgaatcatgaaaatcaactgtatctgcttctgcattgaatctgtaatggtatattgttttggttgaaatacatgaaaaaaattcagtcttacacagacaggcagttgaaaagggaagattattttaatcagcttttcaggtaactgtgtctattctttgagacgacaccaaaatgctacatattttagtttcttcaagaacagttgcaatgcagaattggaaaccctgtccgtgaattcttgcattctgttaatattaaaatccattaagctcgtcttttaaccatgcatgattttgaaacctcatgcattcgtcatttgaaaaatgttagctcactagttacagatctgctacatattaacacatttcattatgcaatagcaaaaagtcatgtttgttaatatcatcactgatctcatggaaagttttaaagtgttgggaagttctcagagtcgtgaatacaaatttttaaaaattataattttcactcaaaagtgcaatttttttgtttgtttgtttagatagagtctcgctctgctgcccaggctggagtgcagtggtgtgatctcggctcactgcaacctccacctcctgggttcaaacaattctcctgcctcagcctcctgagtagctgggattacaggtgcgtgccaccatgcctggctaatttttgtatttttagtagagacggggtttcaccgtgttggccaggctggtcttgaactcctgaccttaggtgatccgcccgcatcggcctcccgaagtgctgggattacaggcgtaaaaagtgcaaattttatcattgacaataatgactgtgaatcattttccttgaagtgacagatatatttctttcatttttgcaaaaatgtctgtcaaacctcctttgatgtggtttggatgttctgtcccctccaaatctcatgttgaaatgtgacctccagtgttggaggcaggcctagtaggaggtgttttggtcacgggggtggattttttgtgaatggcttgctgccattctcctggtaatgagtgagttctcactctatgagttcatgggaaagctcgctgtttaaaagagcctgacacctcctccctctctctttcttgctgtctctcaccatttgacatttctgctccccttcaccttccaccatgactggaagctgcctgaggccctcaccagaaacagatgccagtgccatgcttcctgtacagcctgcagaactgtgagccaaaataaagcacttttctttataaattacccagtctcagatattcctttatagcaatgcaaacagtctggccgggcacttggctcacgcctataatcccagcctttgggaggccaaggagggaggatcgtttgaggccaggagtttgaggccagcctgtccaatatggcaaaaatccatctctacttacaatacaaaaattagctgggcatggtggtgcataccactcagctactcaggaggctgaggcagaagaattgtttgaacccaggaggtggaggttgcagtgagccgagatcacaccactgcactccagcctgggcagcagagcgagactctgtctcaaaaaagaaaaaaaacaacaacagacacacacacagactaatacaccatgtcagaatagctgaggtttgtctgtctaaaaatggaattccatgaaaaaaagtagctggttcagcttgcaattcaaacactcacacaagcagtaattttttttttttttgtcttggagacagctaccatgatacttctgtgtgtagaaaaattttttatccatacttcccgttgcatcacacagaatattaaaaagacatatactcaagagtcaagatttaataaaatgggccagacacagtggctcatgcctgtaatcccagcactttgggaggccaaagtgagtggatcacctaaggtcagaagttcaagaccagcctggccaacatggtgaaaccccgtctctactaaaaatacaaaaaaaaattagcccagcatggtggggggtgcctgtaatctcagctactatggaggctgagggaggagaattgcttgaacctgggaggtagaggtttgcagtgagccgagattgcaccattgcactccagcctgggcggcaagagtgaactccgtctcaaaaaaaaaaaaaggatttaataaaatgaataattgtattgctttatcaagtacaagcctaaatgaaactggctttttttttttttaagacagggtctccctctgtcacccaggctggagtgcagtggtgcaatcatagctcactgtagccttgacatcctgggctcaagtgatgcttccacctcagcctcttgagtagctgggaatacaggtgtgcgccaccaggtctggctaatttttcctctacttttttgtagagactgggtctcaaactcctggactcaagtgatcctcctgcctcggcctcccaaggtgctggaattacaggcatgagtcactgtacctggcctgaaactggcttttgttaaaaccatgagtgtgtggcaatgaagaatataatgacccctagtacagtttggtgctgctgcgttgattcacgcttacatgatagacactgttactcgcccttacttttgctccatgagtgcatagactaacacagtgaaaaaaggcaaataatatcttagaatgattattaaaatcattttgaccttgcagaccccctgaatggtctcaaggctgccacacctggggatttgcaggctacactttgcaaaccattgtcagatggtgataagtcctatggggaaaaaacaataatgagggctggatgcggtggctcacacctgtaatcccagcactttgggaagccgaggtgagcggatcatgaggtcaggagatcgagaccagcctgaccaacatggcgaaataccgtctctactgaaaatacaaaaattagccaggcatggtggtgcacacctgtaatcccagctactcgggaggctgaggcagaagaattgcttgaaccccaggaggcagaggttgcagtgagctgagatcgcaccactgcactccagcctgagcgacagagcaagactctgtctcggaaaaaaaaaattttttttaattaaaaataataattataatcaggaaaagaatatatggagggtgaggagagagtcacagtcttcattaagcagttagtgaatgtccgagtgcgcaggtgatatttgagcaaagacgcaaagcagataaggaagtgagcagggaggatgactacaggaagagcaatccaggtagcgggaacagcaaatgcagagactctgagcagaatatgcctgtgctgtttgaagcccagcaagtacatcatgagtctcccccagtatgttccacagcagctcagactcaaaccatgcccagctagaaagcatttgcaaagcaactcagggagcctagtccagcagagcctgccttttcggttttggcttttttatttgttttggtttggttttttgagacaggatctgactctgttgcccaggctgaagtgcagtagggcaatcatagtttactgcagctttgaattcctgggctcaagcaatcctactgcctcagcctcccaagtagctgagaccacagatgtatactaacaatacaaaaatcagccgggcgtggtggtgcacacctgtaatcccaactactcaggaggctgaggcaggagaatttcttgaacccaggaggtggagagccttctggcatattccccaagtctgctgttagcttccctatcttagtgcacctgaagggaaaggaatgtgtttattaaggcccactgttttactggggcccgttgtatgagggtgaagtttggcagttaaccaagagactttctccccacctccctctgtgccccagctgtcttatttgtgttttatggtctgctctttctgtcttcttgtagttagaagagaagtgatctccctaaaatgcatgaggctagaaaaggagctggaacttaaagtagctgtgtttgtccaagatgatggtgcttctgctctgtgaaaccttatgttcagaaaacaaataacccaattagaaaatgggcaaaggacttgaacagacatttcttaaaagaagacatacaaaatggccaacaggttcatgaaagaaaaaatgctgaatataattaatcatcagggaaatgcaaattaaaaccacaatgagatatcacctaatacctgtcagaatatacaccatagaatactactcagccattaaaaaagaatgaaatcatgtctgttgcaacaacttggatggagctggaggccattatcttaagcgaaataactcagaaacagaaagtcaaatactagctggtgtggtggctcacgcctgtaatcccaacactgtgggaggctgaggagggaggatcccttgagctcaggagtaggagacgaccagcctgggcagcatagcaagatcccatctctacaaaaaataataataattacctgggtgtggtggtgcacacctgtagtcctagctactcaggaggcagaggtgggaggatcacttgaactgaggagctcaaggctgcagtgagccatgatcgtgccactgcactccagcctgagcaacagagcaagatcctgtctttaaaaaaagaaggaagaaagtcaaataccaaatgttctcacaaatgggagctaaacgatgggtacccatggttttacagacaccggcaactccaaaaggtgggagggtcgggggctgagggatgagacactacctgttaggtacaatacacattatttgggtgatggctacactaaaagcctagactttaagagtattcaatatatccatgtatcaaaactgcactgaacccccaaaatctattttaaaaaaaattttttaaggaggagtttcactctggttgcccaggctggagtgcaatggcgtgatctcggctcactgcaacctccacctcctgggttcaagcaattctcctgcctcggcctcccgagtagcttgaattacaggcatgcaccaccacgcctggctaattttgtatttttagtagagacggggtttctccatgttggtcaggctggtcttgaactcccgacctcaggtgatccgcccacctcggcctcccaaagtgtggaattacaggcgtgagccaccgtgcccggccaaaaattttttttaaagaaaaaagataagtggtcaggggaattcggagaaaagacaacccatgtgctctgttggtgggaatgtaaattagtacagccattataaaaaacaaaacaaaacaaaaacagtatggaggctgggcacagtggctcatgcctgtaatttcaaaactttgggaggctgagtggggtggcggggggtggggtgtggatcacctgaggttaggagttcgagaccagcctggccaacatggtgaaaacccatctgtactaaacatacaaaaatcagcgtggcgtggtggtgcgcacctgtaatcccagctactggggaggctgaagcaggagattcacttgaacccaggaggtggaggttgcagtgagccaagttcatgccactgcactccagcctgggcaacagagcaagactctgtctcgaaaaaatagaagaacagtgtggaggtttctcaaaaagttaaaatagaattaccatatgatcctgcagtcccactactggatatgtatatctaaaggaaatgaaatcagtgtctcaaagagatatctgcacccccatgctcattgcaatgttattcacaacagtcaagatatggaagcaacctaagtgtccaccgagaaatggatttttaaatgtactatgctatgcagttgtaagaaaagaaaatcctgtcatttatgacaacatgaacaaatgacaggatttccttttgatgaacctggagaacattatgttgggtgaaataagccaggcactgaaagacaaataccatgatctcacttacatgtggaatctaaaaacaattgaactcataacagcagagaataaaatgatgattaccagagactcaagttggaggattggggagatgttggtcaaaggataccgaatttcagttggtaaagaggaataattttggctgggtgcagtggctcatgcctgtagtcccagcactttgggaagccgaggcaggcggatcacctgaggtcaggagttcgagaccagcctgaccaacgtggtgaaaccctgtctctagtaaaaatacaaaattagccaggagtggtggcgcacacctataatcgcagctacttaggaagctgaggcaggagaatctcttgaacttgggaggcggaggttgcagtgagccaagatcataccactgcactccagcctgggcaacaagagtgagactctgtctcaaaaaacaaaacaaaacaaaaaaaaaaaaaaacgaataatttcaagagatctgttgtacaacatggtgactctagttaataacaatacagtgtattctagacaaatgctaagagagtagattgtaaatgttcttaccataaaagtgaactttggaaggcaatgcacatattgatgagctagatttagccattccacaatgtgtgtgtgtatatttcaaaacatcatgctgtacacaacaaatacacacaattttatctgtcatttaaataaaattttaaaataaaaatatttttaaaacacaccttaaaaaacataatgctgagtgagagaagccggatacaaaaggccacataagtgtatataattctatttatatgaaatgtccagaataggcaaatcctatcctagatttggaaagcagattcgtggttgccaggggctgcaggcgggagaaatgatgagtgatgctaaagggtatagacttccttttggggcgattgaaatgttctggacctagatagaggtgatagttacaggacactgggaattgtactctttaaaagggttaatttgactaggtgcggtggctcatacctgtaatcccagcactttgggaggccaaggtggatagatcactagaggtcaggagttcaagccccctggccagcatggtgaaaccccatctctaccaaaaatacaaaaattagctgggtgtggtgatgcgcacatgtaatcccagctactcaggaggctgaggaagagaattgcttgaacccgggaggaggatgttgcagtgagccgagatatcgccactgcactccagcctgggtgacagagggagactctgtgtcaaaaaaaaaaaaaaagacaattttacattacacaaatttcacttcaataaaacaaaagtaaaggagtaccaaaaaaacctcggtattaaagagaaacaatatttcaatgaaatctttttagaaatcaaaatgaatgcaaaaaaatccacaatgaacaaatagatcaacatgttaaatcaagacaggaccaaagttcctacttttccttctgcttttttcttttttttttttttctagagggagtcttgctctgtcacgcagtggcgtgatcttggctcactgcaatctccgcctcccgggttctagtgattctcctgcctcagcctcccgagtagctgggattacaggtgcctaccaccacgtccagctaatttttgtatttttagtagagacggggtttcaccatgttgggcaggctggtcttgaactcctgaccttaggtgatccacccgcctcagcctcccaaagtgctgggattacaggcgtgagccaacgcgcccagtgccttctgcttttcaggctcctgtgtggctcagttcagcactcttactgattctatcttgaacattctgctatttgggttaaccatggattgtttgcattaatttcatgagttgtttttaattattgacattggagtattatttagcttagtcgccggttttttggtgctacctgatattttgtatgtgggactgactggtatctcaacctcactgtggccttgtgagtctcttgctctctcaacagtaaaggctgccagctcccttttacagataagaagggtctcaaagaggttaagcagcaggcctcagaattaataaagagcagggtcacggccgggtgtagtggctcacgcctgtaatcccagcactttgggaggccgaggcaggcagacaggtggtgcgcacctgtaatcccagctactcaggaggctgaggcaggagaatcgcttgaactcaggaggtggagtttgcagtgagccaagatcatgccactgcactccatcttgggctacagagcaagactctgtctcaaaaaaaaaaaaaatgagcagggttagattggagcccacatctgtctggctcaaacctccagccaccccaggtccactctgaccaaaggctccaactctggccctagcattaggagggcagggcagtgcagacggagcaccccgggctgtcccagacgactgccccagctgcaaggtggagcttgaacacgagctgagccaagaagagtctgagaccgaggaattgaggctaattcctctgtgggaaacgctccctattaattaattagggcagagctagcctgaggcatccccgcagcccccagagtcattaaaggagagggagtctcattatcggctaacagcttccccaccgttcccagggccccagagggagcagaggaggtgggaggaggaccaggtctccccgtcctgatcccctgtctttcattaccagagtggcctgatatgcaagcgaattgtctaaaagtagaatttcaggggaggtaaaaaagggaaagtcagaactgagggattcaggataccccctcccaaattcagtctgcacttatatttatataaaatacccagcacaggtaaatccataaagatagacatccaattagtggttgcccagggctggagtcggggggcaatggtgagtgactgctgatgatgggtagagggtttccttctgggggggtgaaagctgtagtcaaacttgataatgctgacggtagcacagcactgcaaatgtactaaagtcactgaaccgtcaactttcaaatggtcaattttatgttatgtgtattttataatttaaaaaaatcaatctccttctcattcctggctatttcatcaacatttattaacatgtgctttctgcccggcattgtactgggaggggaggcctggtgccaccctggcaactctgtcttagtgagagatgtcatggtcaacaactgtttgaggcctgcatgcaaggggtaaaggaatttaccaagacaagagtgagttttaaaaggcagatgtattaaagaaaggaggacatgcattgcaaggatgcaatgggtaagacagcagaaggaaggttgtctgctgtctgaaaagagtcaggggctggagggaaagttttataaggtggtgctccttcagctgagtgcttgcagacaggatggttgggtgcaggtgggcagtgagctgagtgcttgcaaacaagatgcttgtgtgcagatgggctgtgagctgaaagcttgtagataagatgcttgggtgcaggtgggctgtgagctgagcacttgcaacagaatgcttgggtgcaggcgggctgtgagctgagcactagaagctagcgggccttttgcagttgaccccatttctcagaacatttgcttctctcaaccccagataagcccattctttaagttttcttttaactccttagggctccacacgaaatgatgctggagaccttcaagatggcctccagggatgttctccatctgtcctccccttgttctgtgtccaggttcatggatcaaaccaacaagaagccttgtcctctgtcttctggttggcttcaagcaatgggaagcccttacaggaggcaagagggatgaaagagggtgaggccagagtatttatttcctggggtgcctccctgcatcccccctgcagattggccctagactgcagagcacaaggtcctggctggcagccccctctaggttccagtagtaacagctccctcccctctctgcatctgcccaggagtggtaataacccccagatgctgactgctccacgtaactgcatggattctgcaatcctgtatggtttctttaccccctaccacaccttgacccaactcccctcaaactgcccagtctaccctccatctttctccaggggttagagagaatgcaaccctccgacttgctctgcaccccagaaggtggatttttgtggctatcaatgggctgcctgccttggagaatctggtggggttggctttgtgaaagtaaaataaatttggggaccccaaaatcactaagccaaagggaaaagtcaagctgggagctgcttagggcaaacccccttgcctttctattgcttaaaaagtttgggtgcgccatcctgagtttctttctgttcagacttccctcttgatatgtatttagaagaggaagaagaaaaataagcaggcaggtagtaaagtataatcacaatgggatagtattcagccacaaaaaaaataaggaaatcctgccatttgcaaccacatggatgaactcggagaacatgatattacaggaaataagccagatacagaaagacaaacactgcatgatctcactcatatgtggaatcctaaaatgttgaactcatagaaaaagagagtagagtggccgagtgtggtggctcacacctgtaatcccagcactttgggaggccaagacgggtggatcacctgaggtcaggagttcgagaccagcctggccaatatggcgaaactccgtctctactaataatacaaaaattagctaggcatggtggcacatgcctgtaatcccagctacttgggaggctgaggtaggagaattgcttgaaccctggaggtggaggttgcagtgagccgagatcataccacagcactccagcctgggcaacaagagtgaaactccatctccaaaaaaaaaaaaaaaaaagaaagaaagaaagaaagaaagaaaagggaagggaagggaagggaagggaagaaaaagaaagtagaacagtggttaccataccatagccttgggtggttgaggagatgttggtcaaaggatgccaaatttcagttagataggagaaaaaagttcaagagatctattgtacagcatggttaccctattctcaaaaaatgcgaagcgaacagatgcaaatgcttcaccacaaaaatgataactatatgagggaatgcatatgttaattgactagatttagtcattccacaatatatatatacgataaaacgttatgctatacatgatatacagatacaatttgtgtcaatttttaaatttttaattaaaacatatattaaaagtccagatccccaatgttggcatcaatagttgcttaagtgtgaacaaaaatacaatttgacattaaaaaagtaaagtatagtagtagaagtgtcctcagttgacctcatagaagaagagagatggtagatcactggtagatccaggagctaggttaccccggaaaagaacattagacagcaatatcattgatgaagaagagagagggaaggaaaagggggtgtccattttaaagatcttaaagattttttttactatcaaggtaatttatgttcattgcagaaaatctgaaaaatgcagaaagaatagaaggaaacacggtagaaaaaattcaaccaaatcctatttataatcaacactaaattgttggtgaactgctttccaggtggagatatttgtcttacttcaaaattagaatcatgcctacctgctacatgaataaaccttgaggacagtgggctaagtgaaagaagccaaatgcaaaaggacaagtattgtatgattcaacttatatgagatacatagaatagccaaagcaaagacaaaaagtagaacattggttaccagggactgcagagttgcaaggagaatggggagttattgtttgatgggcactgagtttcatctggggaagacggatgaaggtaatggttgcacaacaatgggattgtacttaatgccactgaactgtacacttagaaatatatacattagaatcctgccaattggtcagtttgttctcctcctcctccttctccttccccttctttctttcctcctcctcctcctccctctcctcctcctctttcttcttcttcttcttcttcttcttcttcttgttcttcttcctcttcttcttcttcctctcattgtaccttaagccgttacttctatctgacatgattttgatggtttattttagtttttcatttttcccactgactgacaagctccaggagagaagagaaacttcatcttactgctccactctcctggctcttagcctggtgcctgacacagagcagatgctcaataaacatttgccaagtcactcgatcaatcaatcaatcaagccattaggaaagaaagattttctagtgggcccccaagtctactctccatccttctccaggaggtagaaaggatgcacccctccaacttgctctgcaccccaggtggtggatttttgtggatatcagtgggctcccttccttggaggatctggtggggtgtgaaaggaaaataaatcttgggacccagaaatcactaagccaaagggaaaagtcaagctgggaactacttagggcaaacatgcctccgattctattcctaaaaaagatagctactaagataaaagagctacatatctccctcacaaggaatttccttgcaggcaaaggacagacaaaactcagtcatccctctgctcactgagataaatgcatatctgcttgcctcctttggaaaggcgaatcagaaactcaaaagaatgcaaccatttgtctcttacctacctatgacctggaagcctcctccctactttgagttgttccacctttctggatggaaccaatgtacttcttacagatatttactgatgtctcgtgtctctctaaaatgtataaaaccaagctgtgcccagaccaccttgagggcatgtcatcaggacctcctgaggatgtatcacaggcactcatttttaactttggcaaaataaacttcctaaattgactgataattgtctcagatatttggggttcatagcttaaaagaatccccagaaaatggcagcattggggcagattaaggcgggaaaccaggatattagaagatgagcttcagacagccaagagagcaagtggctgcttctcccttgctctgctatttgagatgcttccccggtgcacctacctgtgataggcaatgccacacagagacaggccaggaataggcaggggaccctcagctaaaggagcagaagccattatattagttttctagggctgccataacaaatcacagcaaattgtctggttgaaagccacaggaatttattctcacacagtcttggaaggcagaagtctgaaatcaaggtgttggtagggctgtgctccttccaaagctctggaggagaatcttcccttgcctcattctagtttctcatagttgccaagaatcctgggcatttcttggcttgtatatcctctactccaatcttcatgtctttttttttaattgacaagtaaaaattgcatatatttatgatgtacaatatgatgtttgtgtgtgtgtgtgtgtgtatgcactatggaatgaataaatcaagctattaacatatgcatgtaaactaaaaataaaattctatgccctaccaaccatctgaatggacccctcttggccaagggcattccaaaattaacctgaaaaactagttcaggccatgatagaaagacggaatcagacatgcctcattaagctctcttccctttggaattcaggcatagctggccagcattaacattaaaacagagatcttggccaggtgtgatggctcacccctgtaatcccagcactttgggaggccaaggtgggcagatcacttgagggtgggagttcaagaccagcctggccaacatggtgaaaccctgtctcttctaaaaatacaaaaattagccagtcattgtagcacatgcctgtaatcccagatattcaggtggctgaggcaggagaatcacttgaacccagcagggagaggttgcagcgagccaagatcatgccactgtactccagcctgggcaacagagtgagactctgtctcaaaaaacaaacaaaacaaaaaaataaacaacaacaacaaaaaaagcagagatcttaagactttttgtagcaataagacaccaaattccaaattactttagtatagcatcacatgacagatagcaggtcctgaaagaaattgagatattttactctaaaatgtatttctttgacatattttgaaatggctctgcaaagctgtctcttgtgaggaaaatctacactttttggagcatcccttctcctttccaggtcttctccctgatccaggagagaattaactgggtctagaacctttttaagtctgataagaaacatttatttatttatttatttatttatttatttatttatttttaatggagtcttgctctgtcacccaggctggagtgcagtggcactatctcggctcactgcagcctccgcctcctgggttcacgccattctcctgcctcagcctcccgagtagctgggactacaggtgcccgccaccacacctggctaatttttttgtatttttagtagagacggggtttcatcgtgttagccatgatggtctcaatctcctgacctcgtgattcacctgcctcagcctcccaaagtgctgggattacaggcgtgagccaccatgcccggccaagaaacatttataatctactctctctgaagcctgctacctggtggcttcatctgcaaaataagaaccttggtctccacaaccccttattttaacccagacactctcttctatggattccaggtctttatataaactctttcaaccaattgccaattggaaaatctttgaatccacctatgacctggaagccccccaactcctacccacctcaagttgtcccgtctttctgagtcgacccaatgtacacttaacatgtattgactgatgtctcttgtctgcctaaaatgtataaaaccaagctgtagcttaaagaccttgggcacatgtcatcaggacctctcctgtgtcacaggcctgtcaataaccttggcaaaataaacttctaaactgattgagactcatctgagatacttcttggtttacatgcattatctcacatacttatcatttttttgtggtgagaacactgcaaatctctttcagcaattttcaagtacacacagtctccaacttacaatggttcaacttgtgatttttttactctaccgtggggcaaagtagaaaccatcctttgagtagccacacaatcattcttgttttcaccttcaatacaatagtcaataaattacatgagatagtcaacattttattataaaataggtttttttgttttttattattatactttaagttttagggtacatgtgcacaacatgctggtttgttacatatatatacatgtgctatgttggtgtgctgcacccagtaactcgtcatttaacattaggtatgtctcctaatgctatctcttccccctcccccccaccccacaacaggccccggtgtgtgaggttccccttcctgtgtccatgtgggaattgaacaatgaaaaataggttttgtgttagatgattttgctcaactctaggctaatgtaagtgttctgcgcatgtttaaggtagatgaggctaagctatggtgttcagtaggttatatgtattaaatgcattttgacttatgatattttcaacttatgatgggtttatcaggatgtaaccttatcataagttgaggaaaatctctatgcaatatactgttattaactatagttgccacgatgtataacagatctgttgaacttattcttctcttctagctaaaattttgtgtcttctgaccaacatctccccaattgcccccaatcctagcctctggcaaccaccattttattctgtttctatcagtttgtcttttttaccttccacatataagtgagaagatgcagtatttgtctttgtgcctgggttatttcatttagcctaatgtcctccagcttcatccaggttgttgcaaatgacaggatttccttctttctaatggctaaatagtattctattgtgtatatgtgccacattttctttatccaaccggatggactcaggttcattccatatcttggctactgtgaacagtgctgcaataaacatggggagtgcaaatatctccttgacatactgatgccatttcctttgctgatcatcatgttttcacacggcattgtccccatgcatctctgttctcttatacacatggccaacttgtcataaggacaccagtaggatccaacccactccagtaccaccttaccttacttacatctgcaatgaccctaattccaaataacatcacattcacatgtaccacaggggaggactccaacatatctttttctgagaggcacaattcaacccataacagtagataagccctttcaacagttcttcttcccacctaatttgggttatcccacaaacagaaaagatgtttgaaggttgaacagctagaacaggaatgttcatagcagaagcagaagaaagtccttggttggtccacacacatggagtatgttttagcatgacagagcagccatcattatgtcactcagcgaacaaatattaagggtctactttgttccagtttgttcccaaactgggctgggaacttagttattcagtaataactaagacaaatgagatgcccaccaaggagctgacattctagagagggaaggaaaagaattacaatctgacaagagctacgaggggaggagggatggcgtatagcccggtggtgtgagacctcaaaccgagtggtcagagaagagttctttaagagataatatttgaacagagacccaaagcaagaaagggagaaagccatataaaaatgcagaataagaacatttcagagaggggaaaaacaaatgcaaagactatgagaataaacacggatggtgagcacatcatgactgatcctttatgatctttggacagagaggtgggagatggaaggaaaggtgggatggggccagatggtaagaaattgggattctgtagattctggtaaggaacttggatgccattctaaacctgaggttcacttcactgaacccacctattggttgtaaagccacagtcttcctaaccttcttattttcttgagacagggtctcactctgtcactcaggctggagtgcagtggcacaatcagggctcattgcagcctcgacctcccttggctcaggtgattctccttcttcagcctccagagtagctggaaccacaggcacacaccataatgccctgctaatttttccattttttgtagagccagggtttaccatgttgcccagattggtctcaaactcctgggcttaagcaattcatccgcctcagtctcccaaagtgctgggattacagtagtgagccaccacacctggccctaacctaactattaatacccaaattcactaatgagaaaaagattttccaagtaaaaagtgaggaatgagaagtgaatggagaatgaaaacctgatgcacacgctatttctcttttattttattttattattgttttattttgttttgagacaggatcttgctgtgttacccaggctggagtgcagtggtgcgatcatagctcactgcagcctccatctcctgggctcaagcgatcctcccaccccagcctcttgagtagctcagattccagatatgcaccaccacatccagctgttttttgttttgtttggtttggtttgggttgggttttttgttttgttttgttttttgtttttaagaaacagggtcttgctatgttgcccaggctagcctcaaactcctggcttcaagcaatcctcctacctcagcctcccaaagtgctggaattataggcatgagccaccatgcctggcttggatttcttcagagtgagcaagtgaaagagcaagcaagagagagcagaacagaagccatgatcgctttgtaacctaatctcagaagcagcatctatcatgtttgccataggctgttggttacaagtgacacatcaggtccagcccacactcaagggattacacagggcatgaggatcaggaggtgaggaccattcagggccatctgaagatgcctaacccagctgaaaaagaaatccatcatatttgaggggtggatggcggacaaccagctagtaaagaacacagagtagaggtgaaaaagaaaacatgtgaaagagcacaggggaggggattcaagtcacagagggctgacaatttcaaagctaccaggaggtcaagttgagcaggatagaaaagaaactggaatttgtccattgcaggaagacgttgatgatggatgcctgagccattatttttgtttgtttgtttgtttgtttgtttgttttcggtttgtgtttttcatttttgtctttttgttttttgtgggatgttgttgttgttgttgttgttattttgttttttgtaatagagtctctgtctcacccaggctagagcacagtggcacaatctcagctcactgcaacctccgccccccgggttcaagcgattctcatgactcagcctcttgagtagctgggattacaggcatgtgccaccacgcccagctaatttttgcatttttgtacagatggggtttcaccatgttggccaggctggtctcgaactcctggcctcaactgatctgcctacctcagcctcccaaagtgctgggattacaggcataagccaccgtgcctggcctgcctgagtcattttgagggactgaccaggggtacagccatagacacaggtccttgtcactcactgaccagcaaggtcactgcctttgcaggagatgacagggaagaaccaggaagcacctcctctcccagcctggggcttcccaccatctcctgacacctccaccagaaaagcgacctcatttctcaaagacaaaacagattctaggtcatatccccctggaatgagagaccaattgatgtgattatctccaagagaaagaggggcacctactaaaagtagaacctggtgtcccagaagggaagacatcggggaacctaaaaaggggtctctgataattacctgccaagatttcacagcgaagggcatctccatgtaatgccaaaaaaaaaaaaaagaaagaaaagaaaagaaaaaaggctagaagttttagaaggtgctccttcttcatccattctgcaatttcactcgatttcgcccaaaagcagaattctgctccctacattgcatgaatcagtatatagaacaggtggccccagcaaagttgcaaaaaggaatttctataaagtgttctttattataaaaatcaagagagctgccaggtgtggtggttcatgcctgtaatcctagcactttgggaggccaagccgggtggattgcctgagctcaggagctcgagaccaacctgggcaacatggagaaaccccatctctattaaaatacaaaaaattagctgggcgtggtggtgggcccctgtagtcccagctactcagcaggctgaggcaggagaattgcttgaacccaggaggaggaggttgcagtgagccaagatcacaccactgcactccagcgtgagcaacagagcaagactctgtctctaaaaaaattaataatgcataaataaaataaataaaaatcagagagctaatttcacaaagaaatataactccctattggcctgagttagaagtatttgggcttcagtatattgggagaagggaaatatgtatagttgtgtatatgcatgcacacatacacacacacacacagaggcatggtgggggaatgaatgtggaaatggttagagtgaaatcaagatcaagttcagaataagtatctctggatagtaaaacaaaaaataaggctggccatggtggcttgtggccataatcccagcactttgagagggtgaggcaggaggatggcttgaagccaggagttcaagacccagactgggcaacatagcaagacctcacctctacaaaaaaaaaaaaaagtcaattgtgatggcatgcacctgtagttccagctattcaggaggctgaagcaagagatctcttgagaccaggagttggaggctttagtgagccaagattgtgccacttcatttcagcctgggtgacagagtgagactctgtctccagaaaaaaaaaaaagattcttattcatttcattatgtttcccatattttatacattttatacaaggtgcataccttgctttcatagcttatttgttagtttaagagaggtatttaggcttggagagtactgaaaaattttcctagtcctcggtcttgtgtacataatgtttctgtagattttttgaacatcactgtttctgttcagacacacgcaggtgaatcacttggaaaatgagagctaatcccagcccagcaatgaatggttccttccagacaggccaggcacagttgctcacatctgaaaccccagagctttggtaggccaaggcgggaggattgtttgagtccaggagtttgagactagcctgggcaacatagcaagatcgtgtctctacaaaaacatttttaaattagccaggcatggtagcacatgcccatagggccagctacccaggaggctgaggcaggaggattgtttaagcccaggagttcaaagttgcagtgagccatgatggtaccactgtactctactctgggtgacaaagcaagaccctgtctcaaaaaaaaaaaaaaaaaagcagggcacggtggcggtcaggagttcacgaatagcctggccaacaatggtgaacaaattgttctactaaaaatacaaaaaattagctgggcgtggtggtgggcatctgtaatcccagctactcagaaggctgaggcaggagaatcacttgaacctgggaggcgtaggttgcagtgaaccgagatcgcgccactgcactccagcctgggcaacaagagtgaaactccttctcacaaaaacaaaaaaacaaaaaaaccagataactcacctgttcttcaaatacatatcaggctagagaagtgtccaaaatgggtcatcaaagccaggagctagcagtgagtttttggaagttgatatagagaatggaaactgggattgggagatggaaatgagaagttggtctgattaagcaatggtctgcaccaatttcaatgcttagataatagtatcatatactagcagcgtgttggtgtcagcgtgttaaactaataaaaagccagaatgtaacagcctgcatagccctaatgcatttcaccagagagccatgtggaagccaaaatcctcacatgcagatctggcatgaggaagcttcctaagcgtctctcaggtagcttggtacaagttctgcccaacagaggtgcttcatacaccaggcagcaagcctacccaaatgagatcccctggttgggaaggtggacgtacttcatgaacaaagcaaaggtagatggttgtgtgcaggtcatctcacatgaggtgtctccctggttctttgtgaaaccctctctggacctcttctggttttgaaatagctcattcatggattcattctattaataaaagtcaaaagtaaacacttacataatgcttactaggtgtcagccatggtgctaagcacttcattcatattaactcattgtctccatgccacaatcctattacctgagttgacagatggggcaacgcaggcacagagatgttaagtgaattgctcgagatcacgtagacagcaagtggcagaatcataatttgaatcctagttcatctggatccagaatacagaccataatatcctcctgatgctcatgaaaatttgttgaaccagataccactggtcccagcagcaaatgactgtgctaaccccatattcccaagcctccatcgccaaaggttatctggccccatttcttgctagtggccctaaagaacataacggcgggtctccaggatggctggcgtgggagtcgctggttgcccatcttattccccccaccccccattactgaatgatcccttgattacaaacccagggtcattcattctttcttgactgtcgcacctctcattcactcaatacgaaaatatttggacaggcacggtggctcatgcctgtaatcccagcacctttgtaggccgaggcaggagaattacttaaggccaggagaccaagaccagccagggaaagatagcaagaccctgtctctacaaaaaaaaaaaaagaaaaagaaaagaaaagaaaatttaaaaataagctatgcatggtggcacatgcccgtagtcctagatacttaggaggctgagagtgagaggatcccttgagtccaggaggttgaggctgcagtgagccatgatcgtgctactgcactccagcctgggtgacagagtgtgatcctgtctgaaaaaataaaataaaataaaaataaaacatgtattgattcttccacttacgtattcctctaataagtacgtattgagtgcttgccatgagccactatctgtgctgggtgctcggtagtggaatacaatggtaaataggagaggcgaggtcaatgccctcatgaagctcacaagtgaaaaacaaatgtccatcattggtcagatggataaacaaagttatggtatataaatgcaatggaatatgattcagccatgaaaaggacagaagcactgatccgtgctacaacatggacaaatctggaaaacacgatgctgagtgagagaaaccagatacaaaaggccacatagtgtgagactccattgacatgaaatgtccagaacaggcaaatctacagagacagggagcagatgagtggttaccaggagctgaggggacaggggaatgagagtgagcgctcgtggggatgaggttttatttggggattggtgaagtgttctagaattcgatacaagtggtgattgcaccacactgtgaaggtgttaatgcctctgaattgtgcaccttaaaatcattcattgtatttatgaaaatttcatctcacaaaaaaaaatcaagtaagatgatcatagcatgtgattgattccatccgtttctttatcctatgtgtattaaggacccactatgtgctatgaactatacagacactgaggatacaagactagcatgcttcctgttctagaggctcttagagtcaatcatcagagaaatgccaattaaaatcacaatgagaggccgggcacggtggctcatacctgtggtcccagcactttgtgggggcgagacgggtggatcatctgaggtcaggactttgagaccagcctggctaacatggtgaaaccccatttctactaaaaatacaaaaattagccgggtgtggtgacacgcacctgtaatcccagctacccgggaggctgaggcagaagaatcgcttgaacccaggaagcagaggttgcagtgagtcgagatcatgccactgcactccagcttgggaaacaagatcaaaagtctgccccccccccaaaaaaaaaccaaccacacacacacaatgagtctgggtgcagtggctcaggcttataatctcaccattttgggaggctgaggtgggaggactgcttgagcccaggagtctgagaccagcctgggcaatgttagcaagactctgtctttacacaaaatttaaaaattagccaagtgtggtggcgtgcgcctatagtcctcgctttttgggagactgaggcagaaggatggcttgatatcaggagttggaggctgcagtgaaccatgatccccccactgcactccagcctgggccacaaagtggggctcagtctctttagaaaaagagagatatatatatacagaatatctattattttaaaagtaaaaagaaaaaaaaacagaggttggcaaggatgcagagaaaagggaaagcttatacactgttggtggggatgcaaattagtacaacctctagggaaacagatggcaatttctcaaagaactaaaaatagaactgccctttgatccagcaatcccactgctgagtatatacctaaaggaagagaaatcattatattaaaaagacatccacacttacatgtttatggcagcactattcactatagcaaagttatggaatcaacttatgtgtccattagcagatgattggatgttaaaatatggtatacaagctgggtgcggtgatttccccctgtaatctcagcattttgggaggtcaaggaagtcgaattgcttgagtccaagagtttgaaaccaacctgggtaacatggcaaaaaccccacctccactaaaaaaacaaaaataattcgcgttttttttttttttacaggcaggcacctgtaatttcagctattcaggaggccaaggtgatggaatcagctgagcctgggaggcagaggttgcagtgagccgagatcatgccactgcacttcagcctgggaaattggagtgagatcttgtctcaaatatataaacatatatatataaaatatacatatatgctatctacacagatcacatagatatgctatctagatagcatatatatatcggatacaaatgccctataaatagcatatctatcatatatctagatagcatatatatatcacatagatatgctatctagacagcatatatatagcatatctataccaaatacatatgccctatatatagcatatctatcacatagatatgctatctaaatagcatatatatcacatagatatctatatatctataaatatcatatatatgctctctagataacatatatatcacatagatatcctatctacatggcacatatatatagcatatatgtcacatgtatgtgctctatatatagcagatatatatcacatatatatgccgtggaatacttagccataaaaaacagtgaaatcttgtcttctgcagcaacatggagggaactagaggccattatcttaagtgaaatgaccgagaaatagaaagtcaaaaaaactcatgttctcacttctaagtggaagctaaaccatgggtacacatggacaaacagagtggaaaacagacattggaggctcccgtaggtaggagggtgagaagggggtgagggatacagtactacctattggctacaatgtacactatttgggtgatgattgcactaaaagcctagtcttcaccactagaaaatatatccatgtagcaaaactgcacttgtatcccaaatccataaaaataaattttttttaaaggctcttaattcttctagggcaggtgagagatgcccaaaagttaaaaagtaaaccaataaatgaataagataatttcagatagcggtgagtgctatgaagacacgaaagaaaatgtaagactaagccaggcgtggtggctcacgcctgtaatgccagcactttgggaggccgaggcaggagaatcacgaggtcaggagttcgagaccagcctggccaacatggcgaaaccccgtctctactaaaaaaaaaaaatgcaaaaaattagctgggcatggtggtgggcgcctgtaagcccagctactcaggagactgaggcaggagaatctcttgaacccgagaggtgaagattgcagtgagcccagctcgcaccactgcactccagcccagacgacagtgcaagactctatgaaaaaaaaaaaaaagaaagaaagaaaaaagaaagagagagagagaaaagaaaagaaaagaaaacgtaagactaaaaaagctacttttgggtagtcaaggacaccaagaacccagccagcaaaaatctgaagactgcaaagtggccagccatgggagtattctacctgtgggaacagcaagtcccaagcttccaagtgtgaaggcgcttcggacaccctgaagctgaaagaagggccatgtgctggaaggtaacggcgagaggaatgcctggtgagaagcctggcccttcttccatgcttaccgacatgcgacagagtgtgacctggacagctggaagcgcttaggacatcctaaagctggaagaagggccatgttgctggaagcaacggcgagaaggatgctagatgggctctttctcaaggagtcaggatgccagtgcacttaggccaagttccaaagcaaagactccatcctactcctccccccacctctggaattccacctcccttgttgcgcccatcgctatggtgacgggcgctctcagtacactgtctctacaggccaggaaagagttgtgtgtctttggggtcccttccgctccgcctagggttcccggccaggccgagagaccaagcagggaccatgcgcgtgttggtacccccggctgagcgcagccaggacacacgcgttggggccccagcatggcgcgaggcagctcaggccatggcgaggaccgcgcacattctgaccgatcgctgcgggcaggaggcggtgaccatgtggcagcccaaggacagcgtgctggacccgaacgtggcccaccacctcggccgcgccgcctacatccagccctggcgcttccgcgtggagatgatcaaaggcggcggcaccttggagaagccgccgccaggcgagggcgtcacgctgtggaagggcaagatgaagccgcccgcctggtacgcccgcctgccgctacccttgcaccgcaaagcgcgcgccctgcagaccaccgaggtggtgcacgcgcacgcgcgtggagcgcgcctcaccgccgcccgcctcggccgcgcgcagcaccagattaacgggcgggtgcgacagctgctgcgccagcgcgaggtcaccgaccacaggctcagcgaagtgcgcaagggtctgcttattaaccagcagagcgtcaagctgcggggctacaggcccaagtctgagaaggtgggaccctcccccacgcccaaccccagcctaactgcaaagactgaggcctccgctatgcggtgtccagccccggggaaatcctttccatactttgggaggccaaggctggttgatcacctgaggtcaggaattcgagaccagcctgaccaacatggtgaaacccccgtctctactaaaaatacaaaattagccgggcctggtggcgcatgcctgtaatctcagctacttgggaggctgaggcaggagaatcacttgaacccgggaggcagaggttgcagtgagccgagatcgtgccattgcactccagcctgggcaacaagagcaaaactccatctcaaaaaaaaaaaaaaaaaatatttccatagagagaacacccaactccggtgaataagggcacaagaagatgagggccagatgcagtagctcacgcctgtaatcccagcactttgggaggccttggtgtgaggaccgcttgagtccaggccttccaggttgcagtgaactatgatggcaccactgtgttccagcctgggtgacaggtgagaacctgtctctaccaaaaattttaaaaagttagctgggtgtgttggtgcacacctgtaatcccagcattttgggatgccgatgcgggaggattgcttgaggccaggagttggagaccagcctgagcaacatagtgagaccccgtctctacaaaaaaaaaaaaatttttagtggcccagcatggtggcatgcacttatggtcccagctacttggaggctgaggcaggaggattgcttaagcccaagagtttgaggctgcagtaagctataatcaggccaaccgcaaaccagcatgggcaacacagtgagatcccatctctccaaaaattgcaggtaaattagccaagtttggtagtttgtgcttgtaatcccagcacttcaggacaccaaggcaggaggattgcttgaggccaggagtttgaggccagcctggacaacacagcaagaccctctctgcaccaaagtttaaaaaaaatagtcaggcatggtggtgcatgcctctagtcccagctacttaggaggctgaagcaggattgtttgagctcaggagttcaaggctgtagtgaaatatgatagggccactacacttcagcctaggagatagtgagactcaaaaacaaacaaacaaaaaaagatgatggatacaggcccaggaagagatgcctaagcccccaagacccaaagagtgagccctgcccaaggagatgagatcctcagcttccctgccccagaggagaaaattatccaaatctcccagccagggagagagggtgcagcccctgattcagactccttgaaaatctccccaaaaagtaaaacccacagccctcagcccaggcataaaatcatccacctagaccctaggcccagagggtaagacccttccatagatgtgagaccctcagtgccccagtcctagtgaaaacacactcccaactcccagctgaggagagcggctgatacccttgtcccaacccaggtgaaactcccccccagaatgttaaataaaacccaattcccctggcttcaggaagtgaaaatctccacccccaggcctcgtctgtggtgaaaggaagaagtcctccctacagagagagacttcagactcccaaccctcacacccaaaggttaagctcccatccagggagaaagagtaagacttctagtaccagtcctggtgaaatcttccccttaaagtgaaatctcaaatccccaccccaaaaggtacaaaaattcctgcctcccgggggagagatgagaccccacccacagaatgggattcctaccctcagcccccagatccaaatattaagactccaaaaacgtaaaccctcatcatccgtatgatatgatccctccacctgtagccagggagaggagataagaccatcactgaggaaggggtgcccagctcccagcctcagggggtgagaacaaccctcccccaagttgagacaccttcatctcagccccctgggctcctatctgtaaaagagagacgcccccaacctcaagctccagagagcaagacccgccaagtcagagagcccactgaaaagatcaaaccttctcaaagagtgagacaccccacccaaaggatgagagtaccctcaacttcatccttcaaactcagagtttatgaggctggcaaaccctctaccaccctggaaagaggaatctcttcccagccctttcttaacgatgtgagggattctctcctcgttttctaggtccctgacaaagctgacagtatgcttacatgggagaaagaggagctgaaaagcatgaagaggaaaatggagagagatatggaaaaatcagaggtcctactcaaggttaggggtgcctgtggacaagttacgggggctggagggggatccctggctgcctaatggacaaaccactctgacctggggactgtcacaatagcaattccttcaagccacactgaccagatattcactgcattttgctttgtgaaatggaaaaagggaggtcatgggagatgacgttgggtctcagaataacaacgaacaaccactctgtaccaaaccctgcgcagtcattgaatccactccttaaggctgtcctgtgaggcagaaactatgatttcctcaatagagatgggaaaattgagacccagagagagacctcacctaataagcaaagccatcagtgaaagcgctgtggtttcagcccaagtgactagagtctagctctttgcactctaacacgtgctccagcttcagccagacttgatctctcgctgcatccttcgcacttgcaatgagaacttcttcatgagggcacaaattaagggggaagagcagccagacttcagggggccttttggacctgttaaggttcgctggaaatttgtgtgctttcgactcatccttttgataaatactaatctggtacctgcttcccaggcaccaggcttggcatcatagataaagtggtgactgagaaagaactagccttgtccttgaagagttaacattctaaaggcattcaaagaaaatacaggctgggaacttgttttatttcctattgtgagattgaagtcttttattgttgttgaactttccttgcttttatgtatagatctcctcagctagactacatttaaaaaagcattggaccttgaaggcagatatagtactaaattatatttcacgtagcaaagctcagtaaggttgtgttgactggggagtggggaggaggggagaagaagggacaggctgggggacgagggtgtggacgaggcaggagactcagtgggggggcggggggcgggggctgctgaaacgctgtccgtggtgctgaatcggaatactgcatatcttctggccgctgtcatattcctttaaatctgatgattcctgaaatatccttccaggaagtcggaggcagagaagggagaagcccctgaggatggacgtgggagcaaagggctataaagagggaaatggatcatgcccataatctcagtactttgggaggccaaggcaggaggattgcttcttgaggccagaagttcaagaccagtctgagcaacatagcaagccctcatctatattttaaaataaaataaaactagccaggcacagttgcaagtgcctgcagtccctattcaggaggctgagggaggaggattgcttgaatccaggagttcaaggctgcagtgagccatgatcatacctctgcgctccagtctgggtaacagaggaagaccctgtctctgtgagagtgagagagagaggtgggaaaggacagatatagatagaaacagagacaggctgcttggcaggacctagtctgaatattgctggagaaaaatacttaccaccaatcagatttgtttcaacttaaaatcatgaagtcaaacctcaaattggcactcaaacctttcccagatacctcgccttaagtctctagaagacttgctgacctgctgggcaagtgatttcataacttctcttcctttagtcctctccagctccctgtgccttccttgctctacggtgatttcaatgaaaaccaccaaagggaacctctctcatttttcctctgtcaatcctataattccacccttccacccttctcctgcaccatcaacatttccttctctcttggctcattgtcaccagtgaacaaagggagaattattctttcatgggtacagatctgttgggatgatgaaaaattctggaggtggattgcaatccagcctggaagacagagcaagattctatataaatgaatgaaggaaggagggaaggaacagaacaggtaaaattaatctccaagtcagcttactggagatgatggttgtacgaatacacttaatgccactaaactgtacacttagcaaggttaaaatagaaacatgttatgtcatatctattttactacaataaaaagcccacctctcttgatctacatgcccctctagatacccatttctctagtccactgcatcttatctgcatatgtcaacttgctcatgttgactccaggcaggctcctcagctaaactgcatttgaataagcattggaccttgaaggcagatacagtactaaattatatttcatgtagcaaaactcagtaaggatgtgttgactggggggtggggaggaggggagaagaagggacaggctgagggtcgagggtgtggacgaggtaggagactcagggactggtggaacgctgtccgtggtgctgaactggacagctgtccttttttttttttttttttttttttgagttggctctattgcccaggctggagtgcagtggcgtggcgtgatcgcagctcactgcaacctctgccttccgagttcaagcaattctccgacctcagcctcccgagtagctgggattacaggtgcctgccagcacacccggctaatttttgtatttttagtagagacgtggtttcaccatgtgcgccaggctggtctcaaactcctgacctcgtgaccacctgcctcggcctcccaaagtgctaggattacaggcatgagccactgcgcccggcctggactgctgtcttgctggtcactgtatccccaccacctggcacatcgcctggcatcagtaggggtttaattaatatttgaattcatgaacaaaagactttttaagtctgctttttaaccaaatgaataaatcccaaagataccatattcagagaaagaagctggacataaagtgtacactctgtaggattccatttatatgaagttttagattcagcaagggttttcctcaaggtacagttagtaaatgctttcagccttgtgtgctgtgcagtttctgtcacaactactcaacttggccagtgtgccatggaaacaacgagaaatgatatgcatatgaatgggcatgactgtgtttcaataaaattttacttacaaaaacaggtctgccatccataggatggaaatttatcaactccttaacaacaggcaaaactcggctgggtgcagcggctcacatctgttatcccagcactttgggaggcccaagcaggagagttgcttgaggccaggagtttgaggccaggaatttgaggccagcttgcacagcatagcaagatatcatctctacaaaaatgtttaaaaataactgggcatggttagcatgcacctgtagtcctagctatttaggaggctgagctgagaggatctcttgagcccaggagtttgaggccacagtgagccaggatcatgccactgcaatccagcctgggagacagagcaagattctgtaaatgaatgaaggaaggaaggactaaaacaggtaaaactagtctccaagtcagcttactagagggggtcagggagggacagaggaaaggggagccagagaaatgtatggcatgatggaaatattttatatcttgatggagagtgtttataagggtgtatatatgtgcaaatgacttgttttgatataactctcaaataattgcaaatatcaaaggaatatgatatgcttcattttattgtggaggaagtaagatttcgatggcgggatgctgtccagatgagacacagcctggtgggaggggggaactcagagaatagcagtctcttaatattgatcagagcagaggaagggagacttcaaggctagaggtggggatgggatgagtgccagttgagaatcaagggggtgacacaggaagatcaagatgtgggtatagtgagtgccagctctccatgttacagtggggaaatgcatgagacaggctcttttctcagggtgccagaacagagccaggcacagaaaccaagcaattgacacccagcacagggaagctgttgctgtctcttactgctcccctcaccccacccccaaagagtcactgaaggcttctgaactgggtaaggaggcaggagatgtctgagcttcaacttaggaattgcttcttcccaagaacacaaacaagagctggaaaggggccgggtgtggtggctcacacctgtaattccaatactttgggaggctgaggcaggaggatcacttgagcccaggagttcaacactagcctgagcaacatagcatcactctgtctcaaaataaaagaacaggaaagggtcaagaatggagtgaggaaggaaaccaatttctcagaaccaatccatatcccagcactttgggaggctgaggcgggtggatcacctgaggtcagaagtttcagaccagcctggccaacatagcaaaatcctgtctctactaaaaaatacaaaaattagctaggtgtgatggcacatgcctgtaatcctagctactcatgaggctgaagcaggagaatcctttgaacccgggaggcagaggtttcagtgagccaagatcgcaccattgcatgatctgtctggaagtgagcagactcacttttacctgattattatgcacagtaccataaacagaagacaactttgtgaataaaaaagtgattttaagacatttctctagctgggcacagcagctcgcgcctgtaattccagcattttgagagcccaaggtgggtggattgcttgagcccaggagtttgagacaagcctggacaacatagtaagaccgcgtccctacaaaaattaaaaaaaaataattagccagtgtggtggcatgtgtctggtgtcccagctacttgggaggctgaggtgggaggatcgcttgagcacaggatgtccaggctgctgtgagctgtgatcatgccactgcactccagcctgggagactgagtgagaccctatctcaaaatatgtatatatatataacttccctggattacctgacatccaagtgaacacccatcacctgggaaaaatgtaagcagaattgcctgacccttgactcttatttccacgttcccataccttaacacaccttcccttctctaaaagccacgtttgcaggaatatctattcagcaccaccaactcatccatgtgtttatctgtaatggctattgaggaaactgtactgttcatggttgtttttgtttttgttttgagacaggatctcactctgttgcccaggctacagtgcagtggtgcaatcatggctcactgcagcctcaacctcctgggctcaggtgacccccccacctcagcctcctgagtagctggaattacagacgtgaatcatcacaccttgctaattttttgcttttttgtagagatggagtttcaccatgtggcccaggctggtcttgaactcctaggctcaagcgatcctcccatcttggcctcccaaagtgctggaattacaggcatgagccaccacacccagcctgaatgcagtgattttttcacagtgtgtttataggtcaaaacatcaagttgtacactttaaataaatacaatttttatttatcaattatacctcaataaagctgggaaaattaagtggaaaagaatacgttttaaatgaacttactacaaaaaaatgataagtatgtgagacgatggatatgttaattagtttgataacatccttccacattgcatacacaaatcaaagcatcacattgcatgccataaatatatacaattattatttttcaattaaaaacaaaaatttaagtaaaataataaagtaaaccttgaggggtggtgtgatgtgagtcaaaggaggaaaaagaatcattttttcataagatgtagacatgtctctcctaaaaaagattttgtgaaagaaaatatttatctggaacattggggaaataagttaaatcaaaaaatatttccaggccaggcacagtggctcatgcctgcaatcctaaaactttgggaggctgaggcaggaagattgcttgagcctaggagtttgagaccagcctaggcaacatagtgagaccctgtctttacaaaaaaataaataaataatacaaattagctgtctcaggaggctgaggcaagaggatcgcttgagcccaggaggttgaggctgcagtgagttacgattccaccactgcactacaacctgtgcaacatgtgtctcaaaacaaaaaaaaataatatatatatacccataagtaaaaacctttaccagtatcaaaaaaaaaaaaaaattaggcacactgcctcacacctgtaattccaacactttggaaggtcaaaggaggaggatagcttgaagccaggagttcaagaccagcctagacaacatagtcagaccccttcttcacaaaaagttttaaaaatagcaaggcatggtgctttactcctgtagtcccagctactcaggaggcttaggcaggaggattacttgagcccaggatgttgaggctctagagagctatggtggcaccactgcactccagcctggatgacagagcaagattttgtctcaaaaaaaaaaaaaaatgagagtgtcagtttccgtttagaggtagaaatgctttacagcctataaggctcaagcctgcagcagagaaatcacttgcatccacttccctcaacctcccagttctcactctgtcttctcctcccctccccacccagaccctggcctcctgccgagacactctgaacttctgcttcaaggagcggctccaagccgtggacctcatgaaccagcctctggacaaggttctggagcaggccagacgccactcatgggtgaacctctcccgagcccccactccacgcacacagggtcagaaaacgcctcctccagaccctgtgggcacctataacccaggtaggagtccactgtactgggtcgtattggtgcccacccagatccccttgactgtcagtgcagcccgtcgcccacttagctgtccctttcctgggaaatagccctagagtcaatgggaggactgaaagcctatcatgctgagcacacattgtcactcagcttttccccctgcactctcctgcccacactcgctgaggactcagtcattcacaggctctgctttttttttttttcctttgagatggagtcttgctctgtcacccaggctggagtgcaatggcctgatctcagctcactgcaacctccgcctcccaggttcaagtgattctcctgcctcggcctcctgagcagctgggattacaggcgcccaccaccacgcccggctaatttttgtatttttagtagaggcgggtgtttcaccatgttggccaggctggtctcgaactcctgacctcaggtgatccacccgcctcagcctcccaaagtgctgggattacaggttacaggctctgcttctaaggaaaccaacccaagacgcttcttacactatcccccgcgccccctggactttcacccagttcctcaataaaaccccctcgcccagggcccaccaccacctgagaatagagagagggacaggggctctgggaacggaggacttggcacccccacgcgcatcctgggcatttgcagcgtgcgccttggcgctaaacgaagccaagcggttgttggtcgagtccaaggacaccttggtagaaatggcaaagaacgaggtggacgtccgggagcaacagctgcagataagcgaccgtgtgtgtgcctcgctggcgcagaaggcgagcgagaccttggagctgaaggtgagcgcattacctgcggctgcgggccagggtgggacaggggaggagacgcggactgggagccagcgtgatccccctgcgcttccctgcccccaggaaagattaaatatgacgttaggactgatgaggggaactatcctccggtgtacgaaatataaccaagagttgtacaccacccacggtctcatcaaggtacggttcggggtgagagccttcgggggtggaggcaggggtgccggtggctggaggctgggtttcaatgcgcttgcacaccgcaccccaccagggtcctctgtcgaaagttcacctggagaccgcagaaaagctggacagacccctggttcgcatgtaccagagacacgtgggcacccaactcccggaggctgcgcgcctcgcacaggtaaaccccctcccccgtacccctctaggcccagccccgccaatggtaaggctccttcctcaagcacatctggaccaggtatgatccccctctcacccaagtcggcctgtccttcaactcctgccacgaagtggggaggcgggggcttcactgggtactgaagtgggtactggcgggggcttcagtgggtactggctcaaataagtcccctcaacccctgtcctcccccctcacacacaccctcactgtccagctctggccttagtctctctaacctgtaaaatgaggagcacgtcagcacccacttcaaatggtggtggtgaggacagatgagttcatgcatgaaaggtgtgtagcatggcacctgcatagaatacccttaaagctgcccagctgttattattaactattattgttattattatttgagacagactctcgctctgtcgcccaggctggagtgcagtggtgcaatcttggctcactgcaaccttcacctcccgggttcaagcgattctcctgcctcagcctcctgagtagctgggattacaggtgcgcgccaccacacccggctaatttttgtatttttagtagagacagagttctgctatgttggccaggctagtcttgaactcctgacctcaggtgatccgcccgcctcggcctcccaaagtgctgggattacaggtgtgagccaccgcgtccggccctgagctgttattattaagtacccttcctaaggaggatccttcctacacatcttgactagatgcattcccctccctcagcctgccctgtcgcggttttttttttttccaggcacacctggcccattcagatgtgttcccctcctcagctgtgttccttacacacacacctggcgcaggtgtgccttcccacgccaggtagccatctgctctggctcacgggtctgccctgctccctatccagggcaccgacaagctgcagtgccacatcacgtacctggaaaagaacctggacgagctgctcgccacgcacaagaacctcagctggggcctcaactgcaagaacatcgggcatgaggtggacggcaacgtggtgcgcctgcgcctgcgccagcggcaaccgcacgtgtgctacgagcaggcgcagcgcctggttaaggactgggacccgcgcacgccgccgccgcgcagcaagagcagcgcggacccctagtgaccccagcgtcccccgccccagccagctgattggatgctggctgggacctcggagagcagacacagccccatggccctccctctcccctgacgcaccctccctccaagcaccctctaggagaattataattaaaaataacaataattatcatgtattaggcacctactgtatgtcaaccacttaccctaggacacgttataagcgcatatcctggtagttaataggatggatttgggtgccagatggctgggatttaaattccagcttcccagtttcaagctgtgtggccttggacaagtcactgtccctctctggccttggtctctccaacctgtaaaatgaggagcatgacagcacccacttcaaatggtggttgtaggcggggcgcggtggctcacgcctgtaatcccggcactttgggaggcggaagcaggcggatcacctgaggtcaggagttcgagaccagcctggccaacatgatgaaaccctgtctctactaaaaatacaaaaattagctgggcctggtggtgcgcacctgtaatcccagctactagggaggctgagacaggagaatcgcttgaacccaggaggcggaggttgcagtgagctgagatcaagccactgcactccagcctgggtgacaagagcgagactccgcctcaaaaaaaaaaaattggtggctgtgaggacagatgagttcatgcatgaaagccctatagtatggtggctgcatagtatatcctcaaggcacctgagctgttattattggcatctccattttacagttgaggaaacaggcacagagaggctgtgcagcttgcccagggtcacacaggaagtagcaaaactggaattttcattccagactcaagagcctgcactctaagtggaacttctaggagctctgctctgtcctaccccatgtggtgtctggtcctgagcccagcactgagaataaagcagtgagcagggctgatgtggtccccactctcagggaggtcacaggttgatccagtgcagctaatgtcatccatttgggtgtggctctggttcaggtccttctgcttttccagtaggctcttggacaccccgccatcacaggacccctcacactgagctgtgattcttatctgctcttcccaggaagatccagggtgttgcacacatacagaaagaatgtgcattacagccacaggtatctcctaagcaactgctctgtgtcagaggctgtgtgaggcgccagggatacagcaaggatgtgtccctccgtcgtggagctcacagtgtatatgctgagaatggccttcacaaatgttggtatccttttggcaaagccagccaattgtatggacctaagcaccaacgtttagcagagaagaaaatgaagctcatttttcttctcattttcccagggttacacagccagagatgggtaaagcaagatttcaacctgtcatgctccacatctcaagcagggaccaggatctgaatgagtccccaaaacaagagaatggagattgggtcaattatggccactggacagaaaaacgcatgggcaaaaaagagagccatctgcccaggatgacagacctgggtaggagttcagctggggatcggctccattggtctgactcagaagcattgtgtgtcacagccagctcccttatgtcaagacagactctacagcttgggggttacaggcccccagtctccctggggctcagactcccacataaactattcttcttcaagcacttcttcccagtaccaatcaggatatcaacaagaaacagcacactccatttgcaagaagtttaagggccaggtgcggtggctcacacctgtaatcccagtacttagggaggccgaggcaggcggatcatttgaggtcagacgttcaagaccagcctggccaacatggtgaaactctacctctactaaaaatacaaaaattagccaggcatggtggcgggagcctgtagtcccagctacttaggaaggctgaggcaggagaatcgcttgaatcccagaggtggaggttgtagtgagctgagatcgccccactgcactccagcctgggtgacagagtgagactctgtctcaaaaaaaaaaaaaaaaaaaagagagagagagagaaagaagtttaagagaccacagttgatcctcattatccccaaatttacttgctaattcacttaccgaaatttatttgtcacttcaaaatcagtacttgtagtgctttcacaatcatttgcaggcatgcacagagccgtgaaaacatttttagccacctgatgttcacactgcccctctgagggcaaagaaggtgatgctgcctttttgtgccagctctcttaccataaacaagtgtccttgtggtagcctatttagcatctctgtctctctctctcttttttttttttttttttttttgcatttttgtgcattttgttggtggtttttgctgtttaaaatgacttccaggggttagtgctgaagtgctgtctactgtccctgagcacaagaaggctgaaatgtgtcttaggggaaaaatacatgcgttagataagcttcattcaggcatgcattatagtgctgtggccgtgacctccatgtgcatgaatgcatcacatatattaaataaggtgtctttttttttttttttgagacagagtctcactctttttgcccaggctggagtgcagtggtgcaattttggctcattgcaacctccgcctcctgtgttcaaacgattctcctgcctcagcttcccaagtagctggaattacatacacacaccgccacacccagctgatttttgtatttttagtagagacagggtttcactatgttggccaggctgctctcgaacttccgacctcaagttaacttccaaccacccgcctcggcctcccaaagtgctgggattacaggcatgagccaccgcacccggccaaataaggtctctttaaatagaaacacctaaaacaaggttatgtcttgattcgttgacaaaagggctgtgaccacaggctcacagaaacctaatcctgtatttccccatgagccatggttcagcgttcactgattcagtgtgcgtggtggctttatggaccattaccgcaaataacaggaattaactgtgtttgcaaaggtgtgggcagctagtagggaaacctcaaaggatagctagcataatatccacatgccagtgattgcggggagccttttccacctgtgggtctgaagggaaagggctgttagcagatgggagcatgtaactctgtgatgctgcagtgtagacgccgtgaaatgcccctacccacctctctgtccattggccagtgtccccgatgggccgaaccaccctgctgacttttgaccttcacgcaggtccttcccggagctgggaattatccctttaccctcacctttgcccatcttgatgcccagaaatcttgcataggaggcaaatgctccccttgcaagcaatgtcttgccctggggtttgcagcctgccaccctcaccttgctgtcaccgccccagtttgtgacctcagctcacacaatgtccccaaacagcatttgcacaattccccccattgcctcagagctgagatttcagctgctgccctagatgtgagtcctgtgcacccagcaagcttctccacgacaccatgaggtgggtgtcattatcccaaccttagagatgaagaaataggcccaaagcagtacaaaatgtatagatgccaccacccagcaagtaaggggctaagtgtgggctgtaaaaattgtaggcagggcaggcgcggtggctcatgcctgtaatcccagcactttgggaggccaaggctggcagatcatttgaggtcaggagttcaagaccagcctggccagcatggtgaaaccctgtctttactttaaaaaatgcaaaaattagctgcacatgttggcacatgcctgtagtcccaactactcagcaggctgaggcgggcttgaacccaggaggcagaggttgcagtgagctgagatcacaccactgcactccagcatggccaacagagcaagactccatctcaaaaaaaaaaaaactgtagggagtccccttaccccccaaaagtcctcctggctggacacagtggctcacacctgtaatctcagcactttgggaggctgacttagaaggattgcttgagcccagaaggttgagacaagcctgggaaacacggtgagaccctcatctctacaaaaaaagtttacaaaattagttgggcatagtggcccatgcctatagtcccagctacttgggaggctgaggcaagaggattgcttgagcccaggagtctgaggctgcagtgagctgtgatcacaccactgcactccagcctgggtgacaaagcaagattctatctaaaaaaaaaaaaaaaagtcctcccatacccctcaaacaatgatcaggtatcacctgcatgagaacacctacgtgcaccaggttccagggtcacactccagacctacggaatcagaatctcagaaggcaaagcacaaaaatccgcattgctcatgagctttctaggagggtccaatgcacaccaatgcttgaaatgcattgcctgctgttgctggtttcccagggctgacttctgcattgggcatagtaaacactaatgagagagcccacaaaaaatatttttattgtaatttctttctttttttttgagacagagtcttgctctgtcgcccaggctggagtgcagcagtgcaatctcagctcattgcaacctccgcctcccaggttcaagcgattctcctgcctcagcctcccaagtaactgggattacaggcagccgtcaccacacccagctaatttttgtatttagtagagacggggtttcaccatgttgatcaggctggtctcaaactcctgacttcaggtgatctgcccaccttggcctctcaaagtgctgggattacaggtgtgagccactgtgcccgacctgtagtttctttttaaatcagaagaaaaatatgaatataataataaatatatgacatactgcattgtatgttatttatgtgatacacaatttatattcatctctatactaatgtaggggtgtttttcacattttgggagttttggggggtttttgagacagggtctcactctgacacccagactggagtgcagtggcataatcatagctcactgcagcttcaaactcctgagctcaagtgagcctcctgtctcggcctcctgagtagctgggacgacaggtgcatgcccccatatctggctaatttttgtatttttttggagcgatggggtctttctctgttgcccaggctggtctcgaactcctggcttcaagtgatcctcccacgttggcctcccagagtgctgagattagaagcgtgagccactgcaccttgccttttcagcatttttttcattgtggtaaactacacacaacaaaatttaccctcttaaccatttttaagtgttcagttcagcagcattaagtaccctcacagtattgtgcaaccttcaccaccatccatctccagaactctttaaatcttgcaaaacagaaagtctataccctttaaataataaccgctcctttcctcctccgcatcccccagcccctgtcaaccactgataccatagataccactttctgtatatgactttgactgttctaggtacctcatataagctacatcaataaagttttacgtatttattttttgatggaagaaggaactcacaaaggtaaatgtgcctcaggcccataaaacccaaaatttggccctacaacttccccttaaaatattgggcacattcctctcattcatgtatttattttacttatttaatttatttattttttattttttgagacagattttcactcttgttgcccaggctggagtgcaatggcacgatctccactcactgcaacctctgcctcctgggttcaagcgattctcctgcctcagcctccagaatagctgggattacaggcatgcgccaccacacccagctaatttttgtgtttttgttagagacggggtttcgccgtgttggccaggctggtctcgaactcctgacatcaggtgatccgcctgcctaggcctcccaaagtgctggaattacaggtgtgagccactgttccaggccgacattgggtaaatatttaagtgaatacatgaacaaataaacagataaagtttgcagagtgttactgtgtgcattgccttatttaattttccactttagacctggaaagttcccttcgtaatcatccagttcaccatgctttgctgtcttccttattctctttccaattttcctggaaagtgagaaactgacatgggaagcaagcagcacagcatccgctgtgggagagatgcagacctgggcttgaccctttagagctgtgttacctcgggcaacttgctcaacctctctgaccctctgttttcgtgacctataaaactgtggatgggcggggcacggtggctcagtgagcctgtaatcccaacactttgggaggccgaggcaggtggatcacctgaggtcaggagtttgagaccagcctgactaatgtagtgaaaccccatctctactaaaaatacaaaagtagccagatgtggtggcgggcacctgtaatctcagctactcaggaggctgaggcaggaggatagtttgaacctgggaggtggaggttgcagtgagtggagattgcaccactgcactcgagcctgggcgacagagctagactccgtctcaaaaaaaataaataaataagataaaataaaaaaataaataaaactggatgataaaggtatctctctcatcaagttgctgggaggatccgttaaggcaatggggtttttgcatagtattccatggtgtatatgtgccacattttcttaatccagtctatcattgttggacatgcgttggctgggttggttccaagtctttgctattgtgaatactgctgcaataaacatacatgtgcatatgtctttatagcagcatgatttataatcctttacatggatgaagctggaaaccattattctcagcaaactatcgcaaggacaaagaaccaaacaccacatgttctcactcataggtgggaattgaacaatgagaacacatggacacaggaaggggaacatcacacaccggggcctgttgtggggtgaggggaggggggagggatagcatttggagatatacctaatgttaaatgacgagttactgggtgcagcacaccaacatggcccatgtatacatatgtaactaacctgcacgttgtgcacatgtaccctaaaacttaaaatataataaaaaaaagacaatggggtttttcatttagttcagggcctggcatggggggaggtctccacacatggtttatgctccttttgtttatcaaaatgacattcacataaaatgagccatcttaaagttagtggcatttggtaaattcacaattgttgtgcaaccaacgcctctatctagttccaaggtatttacatccccccaaaaaggagaccctgtgcccatcaccagtcactccttatttcactctaagaaagaccttactgcttctaaccatggaggccatgctttgcaaagcagtgagttccctggccaagaagcaatcaagcacgggctataatttttcagggagcctcatacaggactaaaacagtgggtgttttgttttgttttgttttgttttgttttgtttttttgagacagagtctcgctctgtcacccaagctggggtgcagtggtgtgatctcagctcactgcaacctccgcctcccaggttcaagcgattctcctgcctcagcctcccgagtagctgggattacaggcatgcgccaccatgcccagctaatttttatatttttagtagagacagggttttaccatgttggccagggtggtctcgaactcctgacctaaagtgatcctcccgccttggcctcccaaggtgctgggattacaggtgtgagccactgcacccggcctaaagtagtgtttcttgaccaggcgattctcccactactcttagggacatgtggcaatgtctggagacatttttggttgtcacaactggggatggaatatcttgctggcatctattgggtagaggccagggatcctctgaaatatcccacagtggacagggcagcttcctgccatgacaaagaagtcttcagttgaaaatgtccattgtatcatggttgagaaaccccacaccaaaataagataactcagaatcatcttcaaagtcaaaaactcttgaacaaagcctggaagtagagacagcagcatattgggattggttatttcagtgcattcttctttccatctatagggacactccgaggtctcatcatcaagtatttcttccacctaaaactctaggatatctgggggaatgagcagctctctccatcaagtccaaatgtgttgtgatatggtttggctgtgtccccacccaaatctcatcttgatttgtaggtcccacacttcccatgtgtcatgggagggacatcttacatggtggcaggtaagatgattaatttgctatagcttccacattgtattccaaaataactgtcccagcacccctcctcatgcctgtggtcagcagggagaaggaaggaggaaggaagaaggaaaagacatgttcctcccctttaagggcatgacctggaagttgtacatacaacttctgctcacttcctattgtccagtacttagtcacatggctacctgtagttgcaaaggagcctgggagacataatctttagcttggtggccatatgccaaactcatatttatataactctgccactagatgcagtatggatttgggggaaacttgaggttttcgtgacactcttcatccattaacaaagaatacttgaggctgcagacttgaggaaatgcttgaaagatggaatgaagagttgagtgatctagggatcaggttgaccatgaatgaagtagggacaagactttcagtcccaacaaagtatttagttgatggaattctgcagaggatggtgactcacgttctagaacctagaaatgggaaagggcccaatcacctcattttacaaatgaagctgctgaaacccagataggagaagcaatttcatttaggtctttcactgagtttgtagcagctcagggctaaaattgaggtccccgactccattctcagtgctctcttcacaactccattcatcctctagagctgtagactgagaaagcaaaccatgaggcttgtggctttgacatgaaggaagcaggacactgctagatccttgaggaggcatatcttggctaaggataggctgagagggcatggagaagccattgagacccgttgtggctatggaactatattctggccaactaaatgagagtagaagggatatgtgaaatattccagcaattcctttaagggaaaggagcatacttctttccccttcccctttcctctttcttcccaactagaacataggatgtgatgataggagctgaagcaaccactttgggttacatggtaaagatgtatgttcaggcaagcagagcaacaaaatagagaaagtttggctccctggtgattactgagcctccattccagctctgagctatctatctgtatttctgcatgaaagaaaaaaaatataattctatttcttaagtcagttacatatgtgtgtgtgtgtgtgtgtgtgtatatatatatatatgcgtatatatatgcatatatttctttgagacagagtctcactctgtcacccaggctggagtgcagtggcacgatttcagctcatgcaacctctgcttcccaagttcaagcgattctcctgcctcagcctcccaaatagctaggattacaggtgcctgccaccacacccagctattttttgtagttttagtagagagggggtttggccatgttggccaggctggtctcaaactcctgaccccacgtaatccacctgccttggcctcccaaagtgctgggattacaggcatgagccaccgcacccagcccagttacttatattctgtaagacttccaagcttataagtaatatatggggtcaggagggggcggattatttctttcagttccgacattgtgttagtagaagtccagggtcccctttgcctctccacctccagaggcataaccatggaccactaagcagctctctcctcccaccttccccagttcatcactggagtcatctactgacctaaccatatgtccctgcaaagcattgtatctctgtttggtaagacccaaaagggggtgatctgcctgcctcagcctcccaagttcaagcgattctcctgcctcagcctcccaaagtgctcggattacaggcgtgagccaccgcgcctggccagtgatccttgttttacagggtaagttctgagtgccagagggggctaggaagagcagagccatcttgctctgaaaagtccctgcatacttgtccagccttacccctcctccctctgtgctgcaggaaatattagagaatgtggattctggagtcagctatcggttcaaattgtgatgcgggtgattattaattgagagaccttggccaaactatttaaactctctgtgcctcagtttcccccatatatatttgttataataaagattcttatcttgcagggctgtgagaattaaatgagatagtgttccttaaagtgcttactacagcgcctagcagacagtgagtgagtgctccatcaacagagaggacaaatattgacctgagtcattaaaaggatcaaaggagggccaggcacagtggctcatgcctgtaatcccggcactttgggaggctgaggcgggtgaataacgaggtcagtagttcaataccagcctggccaaaatggtgacaccctgtctctactaaaattataaaaattagccaggcacggtggtgcacgcctgtatgcctgtagtcccagctactcaggaggcagaagtgggaaaatcacttgaacttgggaggcagaggttgcagtgagctgagatggcaccactacactccagcctgggtgaccaaccaagactccatctcacaaaaaaaaaacaaaggatcaaaaggaggaaggccaggtgtgattgatgcataaaaatgaaggagatcttacccagtggaagagaaagcaggtcagggacgtccctaagaaagctgacattaaagctgacatctgaagtatgaatggacatcagtcaggtaaaaaagagaaagtggggaagactcaggaaagcataacagcctgtgcaacggccctggagcaggcgggaaagcatgtgatgtgtttgggaagttgaagatatttttaagatggtggtggatgaggctggagaggtggctaggggctcaatgttgcaaatcagattcctctttgaatgtcatctggatgcctttttccttcatatttatttcacttgggacccctctttttctgtatatcctccttgctggaaagtcacattcttccaacagaaatctcattctcattgatgaaaaattctgcaatgcatcagtatacttgaagactcaaggactcttgtactgtcagacagcaatcctgggtacccagtctttatccacagattcttaaagaggtttccccactctggggcacttgcaaagtgcctggcctaatcgaagccttatacattgaggaaagtcttctctgggtctgatttgagcagtcttgaatgtacttatctccttcggttctgacactaccacctgtagtgattggaggccaatgtggagaagttcgattccattctgtttggagaaaagacttgcttgaggacagaggcctgcagggctggctcctgcctttctccattcaaatcttgggccatcccctgggcttggtggctcatacctgtaatctcccagcactttgggagaccaaggtggatggatcacttgaggccaggagctcgaaaccagcctggccaacatggcaaaactctgtctctactaaaattacaaaaaaaaaattagcccagagtcatggcgggtacctgtaatcccagctactagggaggctgaggcacgagaatcgcttaaacccaggaggcagaggttgcagtgagccgagattgcaccactgcactccagcctgggcaacagagcgagagaaaaaaaattggggcggccattcccccatcacccttcccattggcctcctctccagctacagggattttgttcatgtttgttctatacctgggccaccctttctcactcccccttggtcctacacctttgcccagaaaattctcactcaagcatgtctcctcctccaggaagtcttagtagtggagccgtggcaggttcctttatgttctcaaagaaccggcttctctccttctgtgtgcttatctcagctttcaaatacatattcattcacgtgactgttttgctaatgattgtctccccccagtaaacttaaggtccatgacagcattttttccactatatctgccacaccctggggcatagtaggaagacaataaatgttagcaggaaggagggaagaaagggagagagaaggaagaaaaaaaagaggaaggaggaagagaggagaaggagggagggagggaaggaaggaaggaaggagaggaggagagaatgaaggaagaaaggaaggagggagggagggaaaaggaaagaaaagaaaaggaagagaggaagagaggagggaagaaagaaagcaaggaaggagggaggaagagaaggatggagggaaagaggagagaaggaaggaaagaagaaatgaaggaaggagaggagaaaggaaaaaaggaaggaaggaagaaagggagggaggaggcaggagggaagaaaggaaggaggcagggaaggaaaggagaggaagaaggagggaaggagggaaggaaggaagagggaagaaggaaaaaagggagaaaggagaaagggagggagagaatgaaggaaggaaagaagaggagaaaggaagagagaaggaaaaaaggaaggaaagaagggagggagggagggagggagagagggagggaaggagaggaggagaccttctcgaggtcagtcttttgggggtctgatttcacatagacattttccacttctggcctttcaggttctagaaggcctctacatctcatcaatagattcccttagattcacaatgccccatcagttgatacgttgttgaccacagtggactttcatttcatcgttctgtggagaaagggcctggggcaggcaattctgctgaaacctctcttccagctatcattttctacccaagcaccctttcacatactctctgggattctctcactcgttctttcctatctctttcctcacccctttcttgaacacagaaacatgtttgtgactgttcattgcaagagtaaccaccgttgccatttctgcttgttcgtggaactaacacacaataattattcctctgtcttcatctcctgcctcattaacacctcagtgattacaggcatcattaattgctattaggtcatctcatcccacggtggtgtgaaccaggtcctccctgaagacttggcccagcttatggatagtatcggtttatggccacctcctttcctccaccttcatcatgaaaaagatctgcaacacacacaccacgcagcttccaaaacaccagccggctgaccagagacaacctccttgtggacactaaagaggcggttgtcctggggtgtgacgtgggcctttccaggtcacacaaccagctagtagggatttattaggagtctacatctgctccccaggtcacagatattggacatctcaactagggcacagaaagggatgttggagagaaaaggatgaagtcaagaagtatttagggagtaaaatagaatgcttcctagatgacagaaactcttccaagtgttttagatacattaacccctcatcacactccagtaaagtggatattactatcgcttctttacaaataaggaaactcagccaccaaaaggttacataattcagaatttgagtcactagggtcaggaatccaacccagaaagtctgatttcaaaggatacatttttaccgttgtgctgttgtgccttccattcaattatctgtttgccacagaatgaaaattcctcacttgcatttgcatctcttccacctgcacccctcacaccacacacacgcacgtgcacacacacacaatctatagcgacttggtagggatagaagcaatatataaatggtcaaaagatgcaccacatcagagaacgcagatgtgcagccttgcatgctaaggtgagagagggagaactgcctttgttaccaaacctgcttcagttcccccagagcagctttgacaaactcattcattctgccaaactcatgtgagcttctcaggatggacctagagagtagccaaacatttccttcatttctttttcatggatcccatccttgggccataaaggaagggaaataagaagacttgggagttccagagagctgctgtcagagcccagctgcaacgcttgggagccaagttatttaactattcttaaacctcacttttctccatgcagttgcacagctgttgtcgggattagcatttctatgcttaaaatgctctaagtcctcactcttgtaatcccagctctctttgagaagccgaggtgggaggattgcttgagcccaggaggagttcgagagcagcctgggcaacacagcaagaccccttgtctatgaaaaagaaaaaaaaatgctctaagtgaatgaagagcatctctcaatcctgtgacttaggtaagcgaaggtcagtaaaagaatacgtatcgcacctgaaatataggtattctgtattgactgacagcttccgtgtatactttatataaattttgttttgaaaagtgacatgtgtgatatgcattccttgccttgatgataaatcaaccccccttcttcacagagctgagttgcaagaatagttgcaaatgcaatcaagattttcatcccaatacaacaacaactactactgctggtatgactgctactactaaacgtattcgaattttttaattgtgcgtgcacatggcaacagacacccagaaggaacataaaaaatcagatgaagtaaaaaaaataaagaattatcttggggattgcttgagaaattacagctgcacagctgggctctccattgcattgcaagctcaatggcttgcaaaactttcatactttcaggaagggaaggaacacctggggtgcttggatgtcttcccagattgtggagaacaaaatcctgcctgacaagatgctgtctcatcttgtcgctggcccatggattgtttaccccccaaggaagcccagaatgatgaaaagttgccaaagatctttgagcaacaccacctcctttcaacactgtgatgagctttcacttctttaactcccaacaaaagcaaagggggccccagaggtcaggacctgagattcagagagaagcatgggctggtgacatagatgcgaatatggactccaggcagagaaacagcactgtggctaagaagatgaattcatggatgtgcccagggggcaagcatgaacaatttagatacatggccattctctgatggtgtgtgaaggcagaagatattcaccacgactgtgaactctcaggaaaatcatgcctaggaagcatgagcatgttcagtgaaacatatgcacttgctcttctgcaaaacaacccaagagatttgggctgcttggagacggggagccctcacccacattgactttcaggcttaagatgccattgctggttttgtgttttggttttgttttgttttgttttttgtttttgagacggagtctcgttctgtagcccaggctgaagtacaatggcacaatctcggctcactgcaacctccacctcccaggttcaagggattcttctgcctcagcctcccgagtagctgggactacaggcatgtgccaccacgcctgggtaatttttgtatttttagtagagatgtggtttcaccatattggccaggctggtttcaaactcctgacctcgtgatccatccgcctcagcctcccaaagtgctgggattacaggagtgagccattgcactcggcccattgctgcttttttaaatgagtaatagtatttttattttaatgaataatagtattttatttctttttttgaatttgtcaatttttaaattgacaaataataattgtatatatttatgaggtacaatgtggtgttttcacatatgtctatattgtggaatgaataaaccaagctagtaaacatatcatctctccttttttttcctctaataagaatatttaaaatctactcttttttgaagtctagatatcaccaaaaaaaatttaatgtttaaaaattgaaaaaatatagccaggcatggtggcgggcacctgtaatcccagctacttgggaggctgaagcaggagaatcacttgaacctaggagacggaggttgcagtgagccaagactgcgccattgcactccagcctgggtgacaagagcgaaactccatctcaaagaaaaaggaaaaagaaaatctactctttcagcaattttgaaatgtacaatattattaactatagtcaccatgctgtacaaatcttagatctcaaaaacatataagttctagtgctctaaagcactgtggggtgaccatagctaacaataatttattgtatattttcaaatggctaaaggagaagatgttgaatgttctcaacacaaagaaattatatatgtttgagatgatggatactctaatcaccctgattcgatcattgtacattgtttatatgcatcaaaatatcgctgtactccataaatacatacaattattatgtgccatttaaaaataataacaacatagaaagacacctgcctctagtaaaaaattaaaaaataaagctgaggcgggcagatcgcctgaggtcaggagttcatgagcagcctggcaaacatggtgaaaccccatctctactaaaaatacaaaaattagcctcaaaaataaccccatttctactaaaaacacaaaaacacacacaaaaaatccagcctgtcgcccaggctggagtagctgggatcacaggtcaaatactattcagcctttaaaaggaggaaattctgtcatttgccacatggatgaatttagagagaacattacggtaagtgaaataatccagacacagaaaaacaaatactgcatgatctcacttatacatgagatctaaaaaagtccgactcgtgaaagtcgagaggtagaatggtggttgccaggggctggggcaggtaatagggagatactgatcaaagcatacaaaatttcatattatgttcttttgtttttttttttttttttttgagagacagggtcttgttctgttgcccaggctggagtgcagcagtggtgcaatcatagctcattgcagcctcaaattcctgggctcaagcaatcctcccacctcagcctcctaagtagctgggactacaccactcctggctcatactgtattcttaaggaaggacgtggtattatttccagtttatatctgtagagcatctgtagagtgaaggggcagaagcatcaattctgacaacttcaggcctttgctcccaatgcacattgaacatttttcatgtgtcatgctgggtgctgcgtaaacacaacatgcatggctcacactctcactggctgactgtctttgggagaaagaagatatcaaaggagatttataagagtaaaatgacttcccaggagaagtgcaggcagccacagtaatttggaaccacctggtccatgaagcgttcagcagaagcttcctccagaagcttcgttttacttgagatctgattaatcttttttgtttttttgtttattttactttaagttttagggtacatgtgcacaacgtgcaggtttgttacatatatatatatgtgccatgttggtgtgctgcacccattaactcatcatttaacattaggtatatctcctaatgctatccctcccccctccctcccccctcccccaccccacaactggccccagtgtgtgatgttccccttcctgtgtccatgtgttctcattgttcaattcccacctatgagtcttttaacaaccaagagtccttgtgtcactctccagctctgaattcctcaatggctccccattgcctatttggatcagggaccaccttattcactttgcctaggacttccctggcttcttagcagtgaaatccccacatgccagaaaactctgcagatctgggcaaaccaggacggttggtaaccctacaacccaaccaaattcagactcccttaaagtgacttcaagccccttcatgatctcaccctttcctggaatcacctctcaccatttggactcacttcccatcaccaggactcatctctcaacaaagggactctcctctcatcactgggctcacctctcaccaccagaactcacatctcaccacctggactcactgtcacctcctggattcacccatctggactcacctctcatcacctagacttatctctcaccccctggactcacctctcaccaactagactcatcccttattacctgtactcatctctcaccagctggactcacccacctgggctcatatctcaccacctggactcatctctcactacctggactcacctctcaccacctggactcacatctcaactgaactcatctctcacaacctggactcacaactcaactgaactgatctcttaccacctggactcacctctcaccacctggattcacctctcaccacctggactcacctctcaccaactggactcacctctcactggactcatctcttaccacctggactcacatctcaactgaactcatctctcacctgaactcatctctcaccagctgtactcacttctcaacacctggactagcccacctggactcacctcatctctcaccttctggactcatctctcacctggagtcacctcttaacaccgggactcacctctcacctggacttacctcccaccacttggactcacctctcaccccctagactcacctctcacaccctggactcatatctcaccatctggactcacctttcacctggactaacctctcaacacctagactcatctctcaccacctagattcacctcgcaccactcggactcatctctcacaacgtggaatcacttctcaccacctggaatcacttctcaccacctagactcatctctcaccacctagactcatctcccatcacctagactcatctcccatcacctgaactcacctctcaccacctggactaactctcaccaccactgtctcttacactttattctctggccatgtggaaacagacatggtgccttgcattcaccaagctcactcattcacctctgctatttccccatgttgggacccctctgcactggctacctctcccacatgcccacctgaaaagcacctactcattcctcaagtctcaggtgacatatacctcctctatgaagccaacttgtaaccatgtaaccactttgggagtcaatgcatgcattcctccatggagtccttacaccaggttgcctttcttggaccagccagttgccagataactctgattaatataattaatcaatttaattacttaattagttaactcacaagtactccagcccatggtgacgcattctctcacatactgatactgtgtaaatatgtgtctcatcagaggagacaggatctcccgacatttcatcatcattggactgaggagaaattcatgaggaaccatctctgccaacctccattttaggagacaaaactaaactgggcatcccagtacactcatccacccagttcttccttcttgggccctcactgtgtgcctggttccaaatgaaacactcaagcacagccttcaacccaagaactgggcagtctaaacccacctgcctccacacaggggcaggggctgcctcagaaatgccctttcaatcctgggctaatccaaggctagttcttcccaactctgcattcagtgatgccatgtttgtaacttgaaatcagctacagcaagagtgaatacatcatggaaattagcaacattacaaatgaggacattttttgctttttattgtttgggaggttttttcattttccttcctttttttttttttttttttaacggagttttgcttttgtcgcccaggctggagtgcaatggtgcaatcttggctcactgcagcctctgtctaccaggttcaagcaattctcctgcctcagcctcccaagtagctgggattacagatgcataccaccacacctggcacatttttgtatttttagtagagatggcgttttatcatgttggtcaggctggtgtcagactctgacctccaatgatccgctggcctcggcctcccaaagtgctgggattacagatgtgagccaccacgcctggccatcctctttattttttaattgacacataataattgtacatattcatggagtacatagtgatgttttgaggcatatgacatacagtaatcagatcagggtaattgacatgtcaatcatctcaaacacttatcatttctttgtgttgggagcatgcaatattctccttctagctgtttgaaactatgtaatatattattgtttactgtagttaccctacagtgctgtagaacactagaacttattcttcctacctagctgtattttttggtggggagatagagcgggggacaagggcaagtaaaaatgccataaaatgtttctaccattttgaagttacctttatctttctttttcaatttttattttaaattcggtggtacatgtgcatatttgttacatgagtttattaatccatttttatactctataaagaaatacccaagactgggtaacttataaaggaaagaggtttaattgacttacagttccccatggccggggaggcctcaggaaacttacaatcatggcagaaggggaagaagcacgtcttacgtggtagcaggagagagaagtgaagagcaaagtgggaaaagccccttataaaatcatgagatttcaggacagctcactcactatcacgagaacagcatgggacaactggccccatgatccaatcacctcccacgatgtccctcccccaaacctggggattacaattcagattacaattcaagatgagatttgagtagggacacagagccagaccatatcagtggctacactacatgatgctaaggtttgctgtatgaatgatcccatcactcaagtagtgagcacaggacacagtaggtagtttttcaaccctcaccccctctcctgccctcctccctctagtagtcaccagtgtctattgtttccatcttcatgtccacgagtagtcaatgttttgctcccacttataagtgagaacatgtggtggttggttttctgttcctgcattaattcacttaggataatggcctccagctgcatccattttgctgcaaacgacatcattttgttgttttctttccttttcttttcttttttctttcttttttttttttttttttttgaggcagagtgttgctctatcgcccaggctggagtgcagtggcacggtcttggctcactgtagcctctgcctcctgggttcaagcaattctcctgcctcagcctccccagtagctgggattacaggcatgcgccaccacgcctggctaatttttgtatttttagtagagatgaggtttcaccatgttggccaggctgttgtcaaactcctgacctcaggtgatccacccacctcggcctcccaaagtgctgggattacaggcatgagccacgcaaccagccatgattttgttattttctatggctgcatagtattccatggtatatatacacacaccatatatatatacaccatatacacacatacacacacacacacacacacacatatatatataacacttttctttatccagtccactgttgatgggcgcctaggttgattccatgtttttgctgttgtgaacagcactagctgtaattttgtatcctttaacaaatctctccctatcctctcttccccctaccattcccagcctctaacatcctctgttccactttttgcttttacaaaatcaacttatttagcttccacacatgaatgagaacatgtgctgtttaactttctgtttctagcttatttcacctaacatactgtcctccagttccatccatgttaccacaaatgacaggatttcattctttttatggctgaatagtattgggggatgttgatttgttgtggttttttggcttcattttgtcttgtttttagagagcgaagtgttagacatcttccaacacatcattgcaaacactccgagtcctgactgattcccctaagatccaactttcttaacggaccagaccctgtcaaacaatgagatttcaaggaggaagaagacagcaaaagcatgctttagctaaaattttggcatggggtaagtgtaggatgttatgtccagtttaatttggtgttttcctgggttttgtttctcttttagtgaaaagtgtgtactttttatgccattgcagaattgattcaatagcaccactgaattgtcggtcacgtggatatgttcagtttgaaaaaaattatcaagctgcacatttaagagttgtgcactaggccgggtgcggtggctcatgcctgtaatcccagcactttgggaggccaagagggacagatcacgaggtcaggagttcgagacaggcctgaccaacatggtgaaaccccatctccactaaaaatacaaaaattggccaggtgtggtagtgagtgcctgtaatcccagcaactcgcgaggctgaggcaggagaatggcatgaacccggaaggcagaggttgcagtgagccaagatcacgccactgcactccagcctgggtgacagagcgagactccgtctcaaaaaaaaaaaaagaaagaaaaaaaaagagtcgcgcacttttcttcacataggttattctcaatagttgtttaaagaacacaaaaaaattgagtttgttccatatgtgctaacatggaaagatgacccagacataattcggtgaacaaggcaagtaacaggacaattttgtagaacgggcccacctatgtaactaacactgcgaatgtgtgtaagtcaatgcggcaataggcactgaagggaaattgctcagtcttgtgcctgggctacctggaagcaaagggaagaattggaaggatgagaacaggccagttttgctaaaaaaaacatttctgtattgctagaaagttgcactactaggaatggaattaaaacatgcatcaggctaagcgtggtggctcacgcctgtaatcccagcactttgggaggcccaggcaggtggatcgttttcagctcaggagtttaacaacagctgggcaacatggcaaaacccagtttctacaaaaaacacacaaaaaattagcctggcatggtggtgcacgcctgtagtcccagctactggggaggctgcggctggagaattgcttgagtccgggaagcagaggttgtagtgagttgagatcataccattgcactccagcctgggcaacttagtgagaccctgtctcaaaaaaaaatccacataaaacttgtacataaatatgtataacagcatccttcaaatagccaaaagcctaacacaactgaaatgttcctccacagatgaataaataaacaaaatgaggtatatctgtacaatggactattattcagtcagaaaaagggatgaagttctaatatatgctaccatgtggatgctatcttcctcctccttgaaatctcattgatttataggatctggtcagctaagaaggctggatcttaggggaaggaattggaatgggagtgtctgcaatggtttgctgaaagacatctaacacttggctctctaaaaaccaaaacaaaatgaaacaggagacaacaaaccaacatccctgcaatactgttcttgaaaacatcatgctgaatgaaagaagccagacacaaaaatcacatagtgtatgattctatttctgtgaaatatccagaacagggaaacctgcagagacagaaactcggctagtggttgcctaaggctgggatgtatggagagattgggagtgatagctaaagggtactgggattcttttggggggtgataaaaatgttctaaaatgagccaggtgtggtggcccgcgcctgtaatctcacactttgggaggccgagtggggaggatcccttgaggccagaagttcgagaccagcctgggcaacacagcaagactttgtctctacaaaaaatcttgaggaaaaaagtagcaaggcatgtacgtgcacacctgtagtcccagctgcccaggaggctgaggtggaaggatcgaataagcccaggagttttaagctgcagtgagctgtgatcgctccactgcactccagcctgggtgacagatcttatctccgaaaaaagaaaaaacaaaatgttccaaaatgaactgacgcaatggttgcatcactgtgaatatattgaaacccactggattgcacacttcaggtgggtgaattgtataatacgtaaattatatctcatttaagctgttgctatcgaaccgagtttgttcttcctctgtgcagcaagccaatcaatgtaatgacagattttgcagaagaggaagagttcgttcatgaggcaattaagcgacgaggtggtaaaacaggtctcaaattctcctccccaaaaatagggtttgagggtgcttatgggatagaaaacggggtgatctaaagtacggagaaaggtgactggcaggtagggaaggtgaggtaatcagaatttctgagcaagcatggttgagctacatggctttagataggacatttgtgcaaaaaatagcatttagcatgatctgaaggtggagtttacggccctctgatatcagctacccacataggtgcagttgaagggtcagtgatctccactggcttaaactaaacaagagctgcctcctacctagttcctgaaaaacaactttaagcacccattactatagtgtcccacagacaaaaatgttatctgtaaggaagccagtgggagtttagttatgcattatttggctacgtgacttgctagtggcgcttttaagatcaactataagtaagcaattaaaagtaagtaagcaattaaacgcaaggcagattaagtctggagggcttaatcaggttcgcctttggtttcactattaacataagaaataaaatgaaacaaaatggctgaaaaataataagaggaggaggaagagaggaatcatcatgatgcatcagttaaggcaactgggctggaacattttaggggttgtttgtttgtttttatatttaagacagagtcttgctctgtcacccaggctggagtgcagaggcacaatcttagctcgctgcagcctcaaactcctaggctcaagccagcctcctacctcagcctcctgagtagctaggactataggtatatgccatcatttttattattattattattttagtgacagggtctcactatgccccggctggtctcaaactcctcacctcaagcgatcctcctgccttggcctcccaaagcgctgggactacagacgtgacccaccacacctcaccccttatagggttgaatgccaactgtgccaattgctgaccttgggcagtcatttcacctctatgagcctcagtttctccatctgcaaaatgggagcaaaaatactgatctgtctagactcttgaagactcgatgagataataactaagtgaagtcggtgttatctacacagtggaaggtgagatgaataaactaggcataatgatgatggtaataaccagatgggctggctatgggatgggggttgggagaggttgtggctgggctggcacagacatctgactcatttagactctctgcctaggccacctttgccagagggagtcccctcagccttgcgatcactcatcccattggcgttggctccatttccacaccacagctgtgtgccaagggtgtgtcatgaggtttcttgagtgacagaaaactcaccgacaataaagggccaggtgattgtgccacccgattcatagaccaggcttctcaggagaaaccccgggagattccacactgtcagccccttctccaagatcagtacgtgggcctgactcctcctcggtgcccagctcagtattggcaactaggagagtagtgagattgaacttggccttgaggaacagctgcctctagagttggtaagtgatttggtggatattagcctctctctctctctctctctctctctctcacacacacacacacacacacacacacacacacacgcacatacacacatacgctccctctcccttcatgaattaatgctctggccagttttggcagaatggaagaaatttccatccatcccctctttcttttcatctgttcatttttttcttatttgtttactcagcaaattctctccaacaccacctctgtgctccctgccacactgttggccatgatggagacagagataatgaagtcaggctttcagtcctgaaaactgagctgccagttcagccatgagagtaagaatcaaaaacactgctgtaattcaagtaggagcaagcagagctgtgagagtccagagaaggaagaggaaagttccaggaggtcaagagggatcctaaaacctacctgggtcaccattgctgttaagcacctagagctctccccaggtcctttgcggatgggaaaatcgagtctcagagaggagagtgagatgccgaaggtcacacagctgggaagggactgaggcaggattcggttctggctccagggctatgctccttccacttcctccctcacaatctttggctcctctttcgtcacagcacttgctgtgtgtgtgtgtgagtgtgtgtgtgtgagagagagagagagagagagagatttaatattcatttctgtcacagactagagctacagaaggacagaaagtcagggagcatgtctgtcttacttaatggattctaagtgcataacacataatagatacccagaaaatatttgctgggtaggtgggtgggtgggtggatggattgatggatggatggatggatgggtgggtgggtagatggataagtaaataggtggatggatagatggaagatagagatgatggatgaaggaatggatagaaggagggctagatggagggatagttggaagatagaatagatggagggatggaagacagagagagataatggatgaatggatggatggatggatgaatgaatgagtggttggatgaataagtggatggatagatagatggatgggtagataaatgggttgatggaagaatgaatgggtatatgggatgactgattaatagatgggtagacagacggatgaatagatgtgtgagtgggtggatggatggatggatgagtggatagataggtaagtggaaagataaattggtggatgggttgatgaataaaaggatggatgttaaattggattgatggatgactagatagatgtgcgggtggaaggatgggtggatgggatgactgattaatagataagtagatggacagatgaatagatggaagggtgagtgggtgaatggatggatagatgatgaattaatggatagatggtagatggatagatgaatgaattgatgggtgactggatagatagatggataaaaacatagatgaatggatggttgatgggggaaggcatagcagatattatgccaccaaaattgtcagagaaggatctagatagaaaaaaaaaaagcattcccggtggggtgcagtggctcacatctataatcccagcactttgggaggctgaggtgggcagatcatgaggtcaggagatcaagaccatcctggctaacacagtgaaatcccgtctctactaaaaatacaataaaattagccaggcatggtggcgcatacctgtagtcccagctactcgggaggctgaggcaggatcatcacttgaacccaggaggcagaggttgcagtgagccgagatcatgccactgcaccccagacagcctgggtgacagagtgagattctgtctcaaaaaaaaaaaaaaaaaaagcaaaaagcattccctactgaggagaaagtgtaggaaaaggcaaagagatggggaaatgccaagagtatgacaaaagtctgtctgtgcagccagagaagagaacaggactcagagatgagaatggagaatgtggacagacattcagactcaaggaagagcaagggaggtggattgaccccttcgtattggagacccagtgagataatatcaaagttgcattccccacttcgatgacattctccttttaaacactcctccaaggcatctctttgagatggcttccccagcccgtcatctcctaggtagaagaggcaaacacatgggtcacttgccctgctcctcattccagggctttcaggggaagttcagtccaccagaagctggtgaatgacccacgggagacacaggaagtttttgggggcggagtgggggacattgtggggtaggctcagcagttctgaagaagacatccagaaatggaagacatcgtgaaattgtcattctaggggtgatatattactacttcatggattatcatctattgcccagatctgtccacagaccaaatccccaccacttgagtgctatttggtctcaaaaatccagatacataagccagtttgtcccctgagcccctcggcctccctttagagaactttaacctatcttctcttgactccaaggatcagacaagggtgctgagagccgggactcacaaccaaaggagaaatgagcaatccgcggtctttggaagaggtaggctgggtgcaggttgaggggagggtgatcatctggggagaaggaaggtgaggattttaatgttttggaaagagtggagggactgaaaaaatcatgatctgaactcagagctaggaggtactttgtagtcaatcaaacagcaaaaaaagactcagagatggaaccgaagttgggttgggtggtgggggcagtcaaacacagctacctctgtctccaaagatcaagttcttctcaacacattaaaggttctgagaagtcctgcaataaacaatttcatgttgattttttaaaagatgaagttcttaccactggggtgctcagtacgctgcttctgttctggaaagaactgttgacccccaatattcttcttcctcagacgggatctcagtattagcttcagaaactctgagacctctgcaagtgaggaggtaatagaggaatgctcagaacactcttggggaggatgaggagacctgcaaatccacaaaatacgacaactggaagggatcttcaaaatcacacacacactcattgtctatatttggaaactgaggctcagatgggagcagtgacttcccccaagttcataccaagctagaaaagagctggaccccaggttgggttgctgtatttgggaactaaaaataaaggacacccaattcaatttgaatttcacatcaacaacaaataattatgtagtataagtatatcccatgcaatatttgggatatacttatactaaaaaggtatttggtttttatttgaaatttaagtgtacctgagcatcttctattatacctggcaaccctaagcccaagcctctcttgttttgtttgttcatttttgagacagggtctcacttattgcccaggctggagtgcagtgacaagatcatagttcactgcagcctcaacttcccaggctcaagctatcctcccacttcagcctccaaagtagctgggaccacagatgcacagcagcacacccagctatatttttcattttttgtagagacagagtctcactatgttgcccaggctggtctcgaactcttgggctcaagcaatcctcccacctcggcctcccaaagtgctgggatcacaggcatgagccaccacacccagcctgcatgcctcttttgactacatctgcttctccttgaacctctccatgctgatttctgtcttctcttggccccaggagaaatatgatatgtcaggtgcccgcctggccctaatactgtgtgtcaccaaagcccgggaaggttccgaagaagacctggatgctctggaacacatgtttcggcagctgagattcgaaagcaccatgaaaagagaccccactgccgaggtattggggtgcctactccaggcctgtttgggggaaaggtactaggttggaagtgtaggctatggggacccagctgagtctggttcttcctctcactccagcaattccaggaagagctggaaaaattccagcaggccatcgattcccgggaagatcccgtcagttgtgccttcgtggtactcatggctcacgggagggaaggcttcctcaagggagaagatggggagatggtcaagctggagaatctcttcgaggccctgaacaacaagaactgccaggccctgcgagctaagcccaaggtgtacatcatacaggcctgtcgaggaggtggggacagatccaagagcacagagtctgtggtttgttgtttctgttttgttttttgagacagcacccaggctggaatgcagtggcggaatctcaactcactgcaatctccatctcccaggctccagccgtcctcctgcctcagcctcctgagtagctgagactacaggctcccgccactatgtcaggctaatttttgtagacagggtctgattatgttgcccaggctggtctcaaactcctgagctcaagcaatcctcctgcctcagcctcccaccatgcccaaccaagtctgtgtttttatccaagccagtcccagatccaaagccccagctgaagccaggcaccatggctcatgcctgtaattccagtactttgggaggcccaggcgggaagattttttgaggccaggagttcaagactagcgtcgagcaatgtaacaagaacccagctctatgaaaaatattaaagattagccaagggcatggtggcatgggcctgtggtcctagctactcaggaggctgaagtaggaggatcacttgagcccaggagttaagaggctgcagtgagctatgattacaccattgcactccagcctgggcaacaaagcaagcccctgtctctaaaaagttaaattaaattaaaaagccccactgcacatggcataccacaaaagcatcctttttttttttttttttttagacggagtcttgctctgtcacccaggctggagtgcgatggcacaatcttggctcactgcaacccccacctcccaggttcaagcaattcttctgcctcagcctcccaagtagctgggattacaggtgcaagccaccatgcctggctaatttttgtatttttagtagagatgggatttgaccatgttggtcaggctggtctcaaactcctgacctcaggtgatctgccttcctcagcctcccaaagtgctgggattacaggtgtgagccaccgtgcccagcccttacctttctttttaagaggcgacatctcgctctgtctcccaggctagagtgtagtggtgcaatcatggctcactgcagcctcaagctcccaggttcaagtgatcctcctgcttcagccccccaaaacactgggaatacaggtgtgagccaccctgcccagcccctttccttacctttctctctgactttgcctcctcctcttcttgttgtttcagaacaaagggaccccggtgaaacagtaggtggagatgagattgtgatggtcatcaaagacagcccacaaaccatcccaacatacacagatgccttgcacgtttattccacggtagagggtatgagctcccagctggcccagggatccctctgctcttccccctctcctgccactcccaactcctgaacctctcctccaggacccacgcccttccaggatcccctctacctaccctctgaagctcccccgaacccacctctctggaattcccaggatacatcgcctaccgacatgatcagaaaggctcatgctttatccagaccctggtggatgtgttcacgaagaggaaaggacatatcttggaacttctgacagaggtgagttgacaaaaggtagctgggaccaccgcccaggccaagaagggtgcaggcggagggggctgagcctcctcctaacccctctccatttccctcagctccaaatccaagccagatctcaatacagaaactaagaagcccactttccaacaactttcccaaatgcagggactcttaaaagccacagtatgggagataaatttctataaacaaatcccccttggatataaacaatgtttgggcaaactgttttcttttaatgtttatatgtttttattgcaaattatttaaaaaatgcccagccaaggattccatacaaactatggtataggaagaggccacaacggtctctcatcttaggacaagaatacccacctgccccgttccctaaccctccccccataagtccatgacactgactcctccaagctcaccacacctgttgctgcaggtgacccggcggatggcagaagcagagctggttcaagaaggaaaagcaaggaaaacgaaccctgaaatccaaagcaccctccggaaacggctgtatctgcagtagaagtagaaagaccaggaggagctttccttccagcattctttctgtctcacagaaatttagaggcagctcttacctctccccaagatcttctgttcccaaggccaaatggcacccagtttcttttccatcacacccttcatgcaggtcctcctgtccttattagagcaagccagccaaaacttagcacaaggcatggtggcaacattaacatcacctccctcaggctggactttctatctttattaatgcaaccgaagagacctaagagtgcattcacttatcccactttctgttcctgtggtcttctttctcccatgaagcagaaactggataaagctcaagattttccatagacaaaccaaagcccactcatcccctcctaccccaatccaacctctgctggctcctgcatctcacttggaggtcaaacctcctcctgaggccaatgcattcccaacttccagttctttcctttaccctggagagttagtaaggtaagaaccattctttctctccaaaaccactcctccttggctggcaagttggtgtcctaactccgttctcttcctagctcatggcctctctagataataaagttgtctcctcctttctggatctcttcctcctaacacccctcccctgaaaccctggactctgccctctctccaagaaaatccatctattcaactattcttgcattcaattactctaaatgagagcgtgttggagctatggcaaattccctgttgtcaccttgctattttgcagacaacataatatttaacctctcataaccagagaggttaaataatttgtcaaatgcaatacagtaagacagaggcaaggacaaggtttgacttccagcccagcctcttttccacaacctgctaaatcctgatccatctgaaaacttttctaattagtgaagatgactaataaaaattttccctatctccaaggtaggagctttctggaagtttctagaaattttcaataaccaccagccaaggttacctccaggtaaccttgcagcaccaggctggaagtcagatcggcttcactatcttccaactctacagcctgtatctctccatccccagctttgacctttcctgctcaagtaacctacgggcacatccagcgtcactaaaaactcagggcttttcttcccggttactcctccaagcgttccctggtatcctcaacctcagatcccaggttcagatttctgcagtcaatctatgacccctctcttcttgcatccttcatatgccaccagacaccatgcccagtccagcctgattttgaaacaactttcatgccggtcttctcttccctgacatgttactgtccaggctcaagtcctcagcttctcatatctgcatctttgcaaccaacttcctcccttgcctctctgcttttccatcccacttttcatgtgtcctccataccatctataacagtgatctccctggaacactcaagaagacacaacataccatattatttaaagaccagggtactggacagtggctcacacctgtattcccgactttgagagtctgaagcgggaggatcacttgaggccaggagttaagagaccagcctgggcaacacagcaagaccctgtctctaaaaaaaaaaattaattaactgggtatggtggcacatgcctgtagtcccagctactcaggaggctgaggtgggaggatgacttgagcccaggagtttgaggctgcaaggagctatgatcatgccagtgcatcccagctctaggtgagacagtgagatccggtctccaaaataaatcaatcaatcaaataaagaccaaagtcaaaccgcacatcaggatctctcacacccttccaattttgccatctaccagcacttagctaaacccatctcccatctcttccaccatgaattcactctttcaaaaaggctaatgtcttcttactcacccttgcctctaagcctttgctatcaccatttcccccaagctggagggccctccctctccctttacccctcttccactacctcccacccctactttttccagaaagccatttcctctcttttttctgattgatccttccctctcacccaggattagatgctggaaatgaccacttctggagggcagggaacaagcccttaatctgcataatgagtgttcaataaacagttgtcaaactttgaaagaaagtgttgaaatctttgttctgtgctgaaacagtgaggctgatacaaaaggagttatggatttaatttcttttttcccagtggctggcttcctcccaggtgtgtctatcatgaatggagaatcaggagcttcagcctgtgtcttctttccttttttttttctttaagagatgagatcttgctctgccacccaggctggagtacagtggcaccatcatagctcactgcaccctcgacctcctgggctcaagcaatcctcccacctcagcctctcatgtagctgggactacaggtgtgcatcaccacacctggctaattttcttatttttcggtagagattgggtcttgctatgttgccgaggctggtctcacagtcctggtctcaagcaatcctcttgccttggcctcccaaagtgctgagattacagatgtgacccaccacaccgagctcctgtctctttcacaaaaacagacgtgttgggaatttgtaaagttacaggccacactttcatgctgaatggctatcttttacataattgttccatctccagaatgtttccaaggaagtatgcagacagaaaaatgtcacttttcagaactataagggacattggaggtgggctagttacagcatcaaagacatttagcaagtgtgccatctctctagcctggtgcccatggcagacatgactaatcaatcacacctatttttcctaatgaactcaagtgttacctcaaagcctttctcctctgagcacttgggaagctgacacctgtctactggcataagtacatcattcctgatccatttgaacctccaccttaggaagtcaatcgtctatggtcattttatgtggtacacccaggaatctagccatggcagtaaccggggttttatccatggagatggaaaaccaagtggccaacacaggggtgggttcgaagggccaagagatctggggtgatgcatgcactgagctctatacacttacttacatgccaacctgcggtccaaacacccaatgattctgggagtctccaaacatgagggtcagaaaactgtgtctcactcaccagatccagtctgcagtttgtttttatcaacaaagctttgctggcacacaggcatgtttattcacttacatactggctacggctgccttcaacctacaatggtagagttgagtagttagaacagacagcatatggcccacaaagctgaaactatttactatttggccccttacagagaaggtttgacaacccctatcctaatatctttccaaaaattccaattttgctatcaatactaattttgatgtcaatgacgtatcacctcacacctgttgggatggctattatcaaaaagataggagataagcgttggtgagggtgtggagaaaagggaacctttgttggtggaaaatagaatggtgcagccattgtggaaaacactatggagattcctaaagaaattaaaaacaggctgggcatggtggctcacacctgtaatcccagcacttagggaggctaaggcgggtggatcacttgagggtgggagttcaagaccagcctggccaacatggtgaaaccccgtctctactaaaaatacaaaaattagccaggtatgttggtgggcgcctgtaataccagctacttgagaggctaaggcaggaaaatcgcttgaacctgggaggcggaggttgcagtgagctgagatcgtgccactgcattccagcctgggagacagagtgagacgctgtctcaaaaagaaaaaaaaaaaggaagaggctgggcgcggtggctcacacctgtaatcccagcactttgggaggccgaggtgggcagatcacgaggtcaggagatcgagaccatcctggctaacacagtgaaaccccgtctctactaaaaatacaaaaaattagccgggcatggtggcgggcacctgtagtcccagctacttgggaggctgaggcaggagaatggcatgaaccctgaaggcagagcttgcagtgagccgagatcacgccactgcactccagcctgggcgacagagcaagactccatctcaaaaaaaaaaaaaacagaactacaaaataatcaagtaatcccactcctaggtatatatgcaaaataaaggaaatcaatatatcaaagagatatctgcactgccatgttaattgcagcactattcacaatagccaagatatagaatcaacctaagtgtctatcaatagatgaatggataaagaaactgcggtatatatgcacaatagaatactattcagccataataaagaacaaaatcgtgtcatttgcagcaacgtggatgagcctggatgacactgtattaagtaaaatcagccacgcacagaaagacaaacatcacatgttctcactcattatctggaagctaaaaaagtagatctggtgaagatagagactggaatggtaattaccagaggctgggaagggaagcgggcagaagacgtgaagagaaatgggttactgggtacaaaagtacagttaggtaggatgaataagttcttgtattcgagagcacagtaggaaaattattattaaccgtaattatttgtatatttcaaaatagcaagaggagaagaatagcagtgttcccaacacaaggaaaagataaacgtttaaggtgatggatatctaattaccctaatttgatcaccaccccaaaaatctgtacaactatgatatatcaaataaaaaaacagaactgtccaggcatggtgactcacgcctgtaacctcaggatgccaaggcgggagaatcacttcagcccaggagttttaaactagcctgggcaacaaagtgaggcttagtctctactaaaaaattttttttaattagctaggtgcggtggtgtgtgcctgtagtcctagctacttgggaggctgaggtgggaggatcgcttgagcccaggaagtcaagaccgcagtgaaccgagattgcacctctgtgcgccagcctgggtgacagagcaagatcctgtctcaaaaaaaaaaaaaaaaagaaagaaaagaaaaaaaaaacagaccaccatatgacccagcaattagactttttggatatatatccaaaggaaatgaaattaaatctagtaaagatatcttcactcccatggtcattgaagcattattcacaatagccaaaatgtgaaaaaatcgaagtgtccatctacggacgaatgaataaggaaaagactgtgcgtgcgtgtgtgtgtgtgtatgtgtctgtgagagagagagagagactgtgtgtgtgtgcatgtgtgtgtgtgcgcacacaatggaatgttattcagctttaaaacaaataaataaatgagattctgccgtttgccatcacatggatgaacctaaagtatattatgctagatggaataagccagcattgaaatctaccgttgtattagtctgttctcgtactgctataaagaaatacttgagtctgggtaatgttcaaagaaaaaaggtgaaggcaggtgccgtggctcacccctgtaatcctagcactttgggaggccgaggtgggcggatcacttgaggtcaggagttcaaaaccagcctggccaacacagtgaaaccctgtctctactacaaatacaaaaaaaattagctgggcatggtggcgcatgcctgtaatcccagctacgcgggaggctgagatgggagaatcacttaaacccaggaggcagaggttgcagtgagcactctagcctgggtgacagagagagattcggtctcaaaaagaaaaaaggtttaattggctcagggttccacaggctgtacaggaagcatggccggggacgtctccggaaacttacaatcatggcggaaggcgaagagaaagcagacacgccttacttggctggagcaggcagaagggaggtggagaggtgctacacacgtttaaacaaccagatctcgcggtaacacactcactagcacaagaacggcaccaaaggagaaacctgcccacatgacccaatcacctcccaccagatcccacctccaacactggggattacaatctgacatgagattgagcagagacagacccaaaccatatcaatggctttgttcttcaagacctgcgactaaaggttttccccaattattaagcaaggatgtgtaggtttagcctggaagtttcatattcagcatcaggaactgatccaggctttgtaggacctgtacagttgggcagaaagagtccctctttaagaagaggacaaacagcaacgcagaattagtacagccacataagcacattgtcagggtctctcctcggaccatgcagaggcccagaaaagtggggatcctgtagcttttgccacatcagctccaaggcaagtccccctttgtttatctgttctccaagacgctctccgatagcagcagaaacagtcgttttaaaatgcagatctgagccgggtatggtggtacgcacctgtaagttccagctacttgggaggttggggtgggaggatcacttgagcccaggaagtcaagactgcagtgagctatgattgtgcattgcagcctgagcaacagaactatctctaaaagaataacaataataaatgtgaaataaatctttgaaaatgcaaatatgacctgctgtgcatcttcttaaaatctttctgtgacctcccactgcccttaggataaggaaaaaagtcttaacttctagatccctacatctttttatctctactccttcagtgtttcttttttttattattattatactttaagttttagggtacatgtgcacaatgtgcaggttagttacatatatatacatgtgccatgctggtgcactgcacccactaacttgtcatctagcattaggtatatctcccaatgctatccctcccccctctcccctcccccctccttcagtgtttctgaagtcactttggacttctttcttttccaagataggctatttcctatctcagttacctctacttagatcactcctccaaaccaccttgttatcctttatactgtagctcaaatacatttctgaagggaagtctctttgtccatcacctcagacaagacccgagtttagagttctttgtagactttttctccaagccacaaatcacactttaaaattatgtcttttgcgatatgattatttattcaaaatctggctcttctacctgatggatccaagattaaacatcaattgtcataagccagtgagctttggggtcatgtgttactgcagcataacctaatctgtgctgactgacacatgagaccagccaggttaaaacagcacattggaatgaatgacattcattctaccagctacctaggaaatgtacagaatctatgagataaaaataaatccacttcttttacctatgagcagtttctatttaatcatgtttaaattttattcactaataagaatgaataagcaatttccaaaggttccaaagtgtagcacccagtttagcatgagacacaagaaaaggaaagggagttctagctttgagaatttggaacctgaactcttcaccttcattctgattggtcgggttatgtgggaataaaatatgtcggctgtttgtgaagttgctcttacagatgatcaattataagaatgaggtcaccttcaccctggccaattcagtaagccaatcaccctattgctgtgtatgctcacccacagtccatacccatggcctcaaggctatcttgatacacccagttggcttgctgttagcttctgatagtacaagtcacaagagagagagagaaaatgggaagaggacaaaaaaagaggattcttccttttggagttgccagtagcatcacgtcattccagtttgcaacttttttgccccacacacaaaaccggcatcattgtgccccctgaaatatacgtgcatcagctggccagcagccccgtctcagatatatgcacagatatgcacatggcactgtcttcttcctcttctaagattctagagtctgataacgtcaactcttcccagcgtttcccaggcctcagcttgtcagctgattccacagaaattatttctgggttagcactagtgttaaccaggtccttgttaactagtcttgccttcttgcttttctggtccttcactacctatttaattaattcccatgttaaattctttctgttaaaagacatcagcagatgattgggtaatgaaaatatggtatatatacagaatggactatgattcagccataaaaaaaaaaaagagtgaaatcatgtctcagaaagtcaaatagcacatgtgtattagtccatcctcattctgctaataaagacatacccaagactgggtaatttataaagaaaagaggtttgatggattcacagttccacatggctggaaaggcctcacaatcatggtggaaggtgaaggaggagcaaaggcacatcttacatggtggcaggcaagagagcgtgtgcaggggaactgccctttataaagccatcagatttcgtgacacttattcactatcacgagaacagcatgagggtaactgaccccatgattcaattaccccccaccaggtccctcccatgacacatggggattatgggaactacaattcaagatgagatttgagtggggacacagccaaaccatatcaacatgttctcatttataagtgggggccaaataatgtgtagacaaggacatagggtgtggaattatagacactggagaggcagaagggtaagagagtaggaggagatggaggatgagaaattactttatgggtacaatgtaccttgtttgggtgacggttacactcaaagcccagatttcaccactaggcaacacatccgtgtaacaaaactggccttgtactccttaaatttatgcacttttttttttctttgagactgagtcttgctctgtcaccaggctggagtgcagtggtgcgatcttggctcactgcaatctccacctcccgggttcaagcaattcccctgcctcagcctcccaagtagctgggattacaggcacccaccaccacgcctggctaattttttgtattttagtagagacgaggtttcaccatgttggccaggatggtctccatctcctgacctcatgatccacccacctcagcctcccaaagcactgggattacaagtgtgaaccactgcacccggccccgtgcaaaattttttcaatggtagcttctggaaaatgtcatctataagaaactacaagtagaacacaaataaatgacagaatatgagctttcggtgtctacattccgtaaatctagtaaataataaatattaacatacaggccaggtgtggcggctcacatctgtaaacccagcactttgggaggctgaggtgggcagatagcttgagctcaggagtttgagactgcctgggcaacatggtgaaaccccatttctactaaaaatgcaaaaacaaatatcctgggatggtggtgcatacctgtagccccagctactagggaggctgaggtgggaggatcaccttgatcctgggaggtggaggttacagtgagccaaaatggcactactgtactccagcctgggtgacagagtgagaacctgtctcaaaagataaaaaaataattaacatacaaaaaaattctctctgttaaaatatctttagtcctcccacaacatggataaaccttgaaaacgttatgttaagttaaataagccagagacacgacgcacaaatattgtatgattccactttagaaggtacccagaataggtaagtttatagaggtggaaagtcgattagaagttttcaagagctggggataaggaggaacagggagtgattgcttaatgagtttgagttttatctggggggtgatgaaaacattttggaaatagtggtgatggctgtacaatgttgtgagtgtaattcacgccactgaactgcacactttaaaaatggttaaagtggccaggcatagtggctaacacctgtaatcccagcactttgggagtccaaggtaggtggatcacttgaggccaggagtttgaaaccagcctggacaacatggtgaaaccccatctttactaaaaatgcaaaaattagccaggcctggtggcacacgcctataattccagctactcgggaagctgaggctggagaatcacttgaacctgagaggcagaggttgtagtgagccaagatcatgccactgcactccagcctgggtgacagagtgagattctgtctcaaaaaaaacgttaaaatgtgccacattttcttaatccagtctatcatttttggacatttgggttggttccaagtctttgctattgtgaatagtgccacaataaattaggagacatacctaatgctaaatgacgagttaatgggtgcagcacaccaacatggcacgtgtatacatatgtaacaaacctgcacgttgtgcacatgtaccctaaaacttaaagtataataataataaaaaagtttaaaaaagttaaaacgagtgagattctgtctcaaaaaaagttaaaatgtcaaattttatgttatataatctaccacaatgttttaaaattaattatgtaaaatatcaaaaaccaatgaattatacactttatatgggtgaattgtatggtgtgtgaattatatctcaataaagctgttcaaaaaaataacttgcgtgctttacaatgaagaaaactggcaaaagctacctttaccaaggaaagaaggttaacatcaccaagaaggtcaagtggatttcacgaagctcctgatttgatgtgataaagggccctttcatctctgcagtcttctttccaaaaactcatcaccccaatctaatcatgagaaaaatatctgacaaacctagattggttaacattctaaaggatacctgaccagtcttcctcgagactatcaaaaacgggcagtcatgatggctcacacctgtaatcccagcactttgggaggtgagggcaggaggattgcttgagcccaggagttcaagaccagcctgggcaacctagcgagaatcccccgatctcttccaaaaatctagaggaaaaaaaagactgtcaaaaaatcatgaaaaacaaggaaaggctgagaaactgtcagaccaaaggagactaagaagacaagatgactaaatgcgttgtcagatcctggacaggattctagaaacagaaaaaggacatttgtgggaaaaagggtgaaatatgaataaaacctggagtttagttagtaatactgtaccaatgttagttttgacaaatgtatcccggttatgtaaaatgttaacattaaaagaaaccagatgaaggaacagtgtaggaattctctgtactgttcttgcaacttttctgtaaacttagaattatttcccaaagtaagtttatttagcgctgcaatgaacatgggagttcaggtatctctttaatacacggatttcaatgatttaatcatggcacaatgtaaacatatgttacaatgtcacattgtaccccctaagtgtgcacaattgttattgtcaattggaaataaacaaagtttatctaaaacaaacaaaaaaataactgtggtagttttcattaaccttgattgcaacagggtgtaatcatcattgattaccaagtaggagaaacaaacctaaagtatctaatccatgtaaacgaatttgtcagttgtcatctgttgctattaaatgaatatgatgtaatatccaattggcaaatcataaattttgatttatacttaatttgagaagtgtttggattttgtacctggtgctgggggttagaatagtactgtgtcattcaatagctacaggattctgggtgggtttaggtttttaggcaacatatctattcctttggatagactcttggtgagaagtgggttgaaagagattagggaacagatattgagtatttcctgaccatgcccaacattttcccattgattattctgtagaaaccagcattggtgggaagacagaataaatgatccccccatgcaaaccacggaattaaagaatgtttgcacacccagaaggcacacccctggttgttcacgttgactgtgtatatatccaaatgggatttctatactacagtttcccaaatgttggtcttttacatgcaaacttcgtctcatatctgcataaccctgtgtgattgttccgttaatatttttctttaaaataattctattttctttaattcgaaatgaaactgtctcagaattcaccactatataattcatctatgtaacaaaaaccacttgcacccccaaaagctattgaaattttaaaattgctttaaaaagggaactgttagccaggcgcagtggctcacgcctgtaatcccagcactttgggaggctgaggtgagtggatcacgaggtcaggagatcaagaccatcctgtccaacatggtggaaccccatatccactaaaaatacaaaaattagcgggcatggtggcgcgcacctgtagtcccagctacttgggagtctgaggcaggagaatcgggaggcggaggttgcagtgagctgaggaggcagaggttgcagtcagccgagatcgcaccactgcagacatagtctcaaaaaaaaagtggccgggggggtgggggtggggaactgttatccatacaataaaatattatttggtaataaaaaggaataaagagccaggtggggtgactcacacctgtaatcctagcactttgggaggctgaaatgagagaattgcttaaggccaggggttcaagaccagccctggcaacagagggagacccagtctctacaaaaaaaaaaaaaaaaaaagaagaagaaaacattagctgggtgtggtggtgcctgcctatagtcccagctactcaggagacggaagtgggaggatcacttgagtccaggaattagagggtgcagtgagctatgatcatgccactgcattctagcctgggcaacagatcaataccctgtctcaaaataaaataaaataaaataaaataaaataattaaattgaaaataagaaaaagaatgaaggactaatacaggctacaacctgaatgaaccttgaaaacattatgcgaagtgggaaaagcccattgcaaaaagccacatattacacagttccattgctatgaaatgttcagaacaggaaagtccataaagacagaaagaggccaggcatggtggctcacgcctgtaatcccaacactttgggaggctgaggcaggtggatcacaaggtcaggagttcaaggccagcctgatcaatatggcgaaaccccgtctctattaaaaatacaaaaagtagccaggcatggtagtgcgttcctgtagtcccagctactcaggaggctgaggcaggagaatcgcttgaacccaggaggcagaggttgcagtgagccaagatcgtgccactgcactcaagcctgggcgacagagcaagactccatctcaagaaagaaaaggacagaaagcagattagcagttgccaggggttgatgggaaagaaacgaggagtgactatttaatgactacaggtttccttttggggtgataaaaaaaacttttggaattggatagtggtgatggtgtcacaactctttgaatatatcaaaaaccattgaattgtatactttcgtttttgggggggttgggggggataggttctcactcagctgccaaggctggagtgcagtggcacaatctcggctcactgcaacctccacatcctaggctcaagtgatcctcctgcctcagcctcccaaagtgctgggattacaggtaggagacaccaggccctgcactgaattgaatactttcaaagggtgaattttatggtatgtgaattatacatcaataaagctgttgttttaaaaaaggaaaatgtacctattataaaaggaaagttagtatcacttgccacaataggaaataactgtcacgcgtgtccgtatagaagactacctaaacaggctttgtgtggagcaacaaggctgttgattcacttgggtgcaagtgggctgagtccaaaaagagagtcagcaaagggagataggagaggagcagctttatagggcttgggtaggccgtggaaagttacagttaaaggtagttgtctattgtcagcagaggagggggtcacaaggtgcatggtggagagatgatgggactcattgtccagaagaatgtcacagggttgattgatcagttggggcagggcaggaacaagtcataatggtggaatgtcataaggtgggttaattagttaagacaggaactggctgtttcacttctttgtggtttttcggctgctccagattttttggctcctgcaggccatctagacgtatatgtgcaggtcacaggagttacaatggctgagcttcggctcagaggcctgaccataaccataccaataagaatatacaagtaaagccgggcgtggtggctcacgcctgtaatcccagcattttgggaggccgaggagggtggatcacaaggtcaagagatcaaaaccatcctggccaacaaggtgaaaccccatatctactaaaaatataaaaattagccaggcgtggtggcgtgcacctgtagtcccagctactcgggaggttaaggcagaagaattacttgaatctgggaggcagaggttgcagtgagctgagattgtgccactgcactccagcctggagacagagcgagactccatctcaaaaaaaaaaagataaaaaaaaaaggatatacgagtaaaatcttaagtgttcatttatgatccactaaaagtcatctcgatgtaccaccagtagtgtgagtctcacatactatgtacaaacatttctccaggagtagtatggcttgttaaaagtgtatgagcaattaatcccagcactttgggaggccgaggcaggcggatcacgaggtcaggagatcgagaccatcctggctaacacggtgaaaccccgtctctactaaaaatacaaaaagaaattagtcgggcatggtggcgggcacctgtagtcccagctacttgggtggctgaggcaggagaatggcgtgaacccaggaggcggagtttacagtgagccgagatcacgccactgcactccagcctgggtgacagagcgagactccatctcaaaaaaaaaaaaaaaaagtgtatgagcattttaatttcaatagatttgttcactcattcattgcattaaaataatttatcgaatctctgtcaaataccaaatgctgtactaggtgctagaaatagcatcaccgacaaagacaaagtcattgatctcatggaactgacattgtgtacggaaatgctgtgataagcaaacacatagcactgcaatatatatttttgctagtgctaagtgtcatggagaaaaataaaacatcgtaagtgggttacagaatcatgggagcaagatgcttttttattgtggcaaaatacacataatatcaaatgtatcgctttaaccattgttttttgttttttgttttttgttttgagacagagttttgctcttgttgcccaggctggagtgcagtggtatgatctcggctcactgcaacctccacctcccgggttcaagcgattctcctgcctcagcctcccaagtagctgggattacaggcgcccaccaccatgcccggctaatttttgtgtttttagtagagacggggtttcaccatgttggccaggctggtctcaaactcctgaccccaggtgatcttcccacctcagcctcccaaagtgctgggattataggcatgagccaccatgcccggccgcgctttaaccattttaaaatattcaagcactggcatttagtgcattcacagtgctgtgcaaccaacacctctgtctcgtcccagaatatttttattacctaaaaggaaactctacacccagacagaaggtcatggaggtgacatttgaacgggaatctgaaggaagagcaagtgagcgccatgtcaagatctgatcttctttgcataccaccttcaccccatatcaacaaactcctgtactattatttcgttcatattttcctttaaagcgagtctgtctctttacttaagagtacagttacctgctgggtacagtggctcatgcctgtaatcccagcactttgggaggccgaggtgggtggattgcttgaggtcaggagttcaagaccagcctgaccaacatggtgaaaccccgtctctactaaaaatacaaaaattggcctggcatggtggtgggggcctgtagtcccacctacttgggaggccaaggcaggagaatcgcttgaacccgggaggtggaagttgcagtgagccgaggttgtgccactgcactccagcctgggcaacagagcgagactccatctcaaaataaataaataaacaaataaataaatgtacagttatccatagaatataatattatttggcaatttaaaaaaataaagtaccatctgttattgaaaagagtcaaactctataaaatgtttgaagaaattttttctgagccaaatatgagcgaccatggtccatgacacagccctcaggagatcctgagaacatgtgtccaagatggtcagggtgcagcttggttttatacattttagggagacgtgagatgtagggagccgaagacccgtgggacgtgaccaactcagcattccaccggaggctacgtgatcaaacagcaaactgtgtaccatgaatgcaggatgtgagcaaactcacgactgctcctgccgacagaaggtttgccggaggcaatctctggcgtggaggttatctactgcaacatctagagcctgctgttcgaggaatgcagtcttgcaagcctactctggactgagcccctggactccttcttccaccccgcttctcactatcttttttgcctaataaatacggagggctgtgtaaagctcagggcccttgtccactagaggcaaggtgcccccgaccccttcttccaaatatactcttttgtctcttgtcttttattcttgcgttcgccccctttgttcagtccaccaggggtcgtggtaggttacatagtggtgccccgaacagcgacagaatcaggctctcaacaatgagagcttacctcaatcaatacatgtaaaatgtacactggctcaggccggaaaggcgggacaactggaagcagggacctccaggtcgtaggcggattcaaagattttctgattggcaattggttgaaaagaattattatctaaagacctggaatcaacagaaaggaatgtctgggttaagataagggattgtggagaccaaagttttatcatgcagatgaagcttccaggtagcaggcttcagagagaatagattataaatattatcagacttaaaaaggtaccagactcttagttaattctctcctagatcagggaaaagatccagaaaggaaagaagattccctatgttaggaataacatgttagggaaccctggaggcaggcagatcacctgaggtcaggagttcaagaccagcctggccaacacgacgaaaccctttctctactaaaaaatacaaaataaaaatacaaaaatattagccgggcatggtggtgtgtgcctgtaatcccagctattcgggaggctgagtcaagagaatcacttgaacctgggaggtggaggttgcagtgagacaagatcgcgccactgccctccaccctgggtgacagagcagaactctgtctcaaaaagaaacaagaaaaaaaacaaaaaaattagaatgcagtaccgattcatgctacaatgtggataaacattgaaaacaggcctgcctcagtggctcatgcctgtaatcccagcactttgggaggctgaggcaggaggatcacttgagctcaggagttcaagaccagcctgggcaacatgatgaaaccacatcgctacaaaacatgcaaaaattagcctggcatgatggtgtgcatcttagtcccagctactaaggaggctgaggtgggaggattacttgatgcctggaagtggaggttgcagtgagccatgatcacaccactgcactccagcctgggcaacagagaaagaccctgtcttaaaaaagaaaaagaaaagaaagagaaaagaaagcatgatgctgagtgaaagaagccagacaaagagggcttcatagtgcataattccatttgcatgagtgtccagaatagataaatccacagacgtagaaagtaggttagaggtagccatgggctagggagtgggaatggggagtgactgctcatggggatagagtatccttttgagggggtgaaagtgttctagaactagatagaggtggggttgtacaaccttgtgaacgtactaaatgccactgaattgtacactttaaaaaggtttaaatgatgacttttatattatgtgaatcttactgtgataaaaatatcctgatttctgtgtcccaaaccattgaaagctaaatcttggggagctgggccctgccaccaggcctccacaatatcaaccctagctgccccagtgattccagtaggcagcaagagttgaagtactggggtctagagaccagttcaagcatgcagatgtgtcagggttaatgatattttgtacaagtcctgggccagataacagctgttacaactaaaaggtcaatacacctaagatacaaagatcttctgcaaataagacacaaataacctaaatgtgtccaaatatgcagataatctttgaaatgggcagccacaggtgagaagctctttaaaaaattaaaataaacgggccagacccggtggctcacgactgtaatcccagcactttgggaggctgaggcgggtggatcacttgaggtcagatgttcgagaccagcctggccaacatggcgaaaccctgtctctactaaaaatacaaaaattagctgggcctagtggcacgtgcctgtaatcccagctactcaggaggttgaggcaggaaaatcgcttgaacctgggaggcggaggttgcagtgagccaaaatcgcaccactgcactccagcctgggtgacagagtgagactccatctgaaaataaaataaaataaaataaaaataaaataaaataatgaaaagaggtctttcctgctagtgaagttaaaaaagaaaaaagaaaaagaaaaagaggtcaacttcactatcagccagggaaatgaataccctagaacttaaagtataataaaaatatatatatttttaaaaaaaaagaaaatgagagtaaagatgacttactagttttcactcatcagactggcaatcattcaaaaactaataatgcaatgaaacccagtgcttgcaactatgtgttgaaaagggcacacctgtgtgttgttcgtgggaatgtgatttattattgcatttgggggaagttactagaacaacacctagttgaaattccacactgggaatccaccctatagaacgatatttatcaagggattatttgtagtagcaacaaaaaacaaactataaataacctgtgtgccctcaatggtggaagggttggataatcagagtacactcctatcatgagccattaggtagctattaaaaataatgagttagatatctatctattcgcctggaggaattccatgatgtacgtgctgccaagttttttaaaaaatggataaataagtaggtttcagagaaacatatacagtcatgtgtcacttaatgacagggattctttctgagaaatgcttcattaggcaatttcatcatagtgccagtaacctagagtgagcttacataaacctaaatggcatagcctactacacaccagggctatacgttctagtctattgctcctagactataaacctgtacagcatgctactgtgctgaatactgtaggtaactgtaacacaacagtaagcatttgtgtatctaaacatagaaaaggtacagtaggcctggtgcagtggttcacacctgtaatcccaacactttgggaggccgaggcgggtggatcatgaggtcaagagttcaagaccagcctgaccaatatggtgaaaccccatctctagtaaaaatacaaaaattagctgggcgtggtggcacacatctatagtcccaactacttgggcggctgaggcaggagaatcgcttgaacccgggaggcggaggttgcagtgagccaagatcgcgccactgcactccagcctgggcgacagagtgagattccgtctcaaaaaaaaaaaaaatacagtaaacataagatataaaacaaaaaatgatatatctatatagaatgcttaccaggcttgcagcactggaagctgccctgagtgagctagcgagagagtgatgagtgaatgtgttgctactgtacacttagcatacactaaatgcattttttaattctctttataatcagcacataataattgtacatgtttatgggtacctgtgatgtcttaatacatatgtacattgcataatgatcaaatcaggatagtgagcatgtccatcacccaaatctttatcatttctttgtggtagttacattcaagatcctccgttttctagctatcttgaaataggcaatacaggccgggcacaggggctcacgcctgtaatcccagcactttgggaagccaaggcgggcggatcgcctgaggtcagcagttggagaccagtctgactaacatggtgaaacccccatctctactaaaaatacaaaaattagctggtcatggtggtgggcacctgtaatctcagctactaaggaggctgaagcaggagaatcatttaaacccaggaggcagaggttgtggtgagctgagatagcaccattgcactccagcctgggtgacagagtgagactccatctcaaaaataaataaataaataaataaataaataaataaatacagatgaagatttgtttgcctgccccattgctcacctcctgctgtgtggcccagtccctaacacgccacagaccactaccagtccatggccttgggattgggacccctgccctagttcatgttattttattacagaagacctaagaaaataatatagtatccaattagagagacttgaaatggaaaggatgttcctaaaagaagcctaattgaaattaggatgggaagagagaggaggaaacacccaccctttgcaaaccatataaatgataaagggttaataaccaaaatataaaataaactcctacaactccacagccaagaaacaactcgattgcaaaatcgattaaaaacttgaatagaaatttatccaatgacatgcaaaaagccaagagatatatgaaaaaatgcacatcactaatcatcagggaaatgaaaatcaaaccacaatgaggccgggcgcagtggctcatgcctgtaatcccagcactttgcgaggctgaggtgggtggatcacttgaggtcaggagatcaagaccagcctggccaacatggtgaaaccccatccctactaaaaatacaaaaattaaaaattagcacacacctgtaatcccagctactcaagaggctgagacaggaggcttgcttgaacctgggaagcagaggttgcagtgagcggagatcgcacctctgcactccagcctgggagacagagcataaataaataaataaataaataaataaacaaacaaacctcactcttttcctcacctaacagcaggtccccgagcagatactgaagatgcctcaacccatagccccttggctcacctctgatttcaccttacagcagcagtgggcaatttcacatatgctggtggaagccccgctacttctgtctttactgtctggacatcttctccagcaccgtgggagtgtgctcagcaggggatttaacatccccaagtaccaccctcaacaaataaaggagtcaatggtaaatacccacatacctcttccctcaatggaataattctgaaggtgcggtctatgtgataccccagagagttcccccagcaggatggagccctgtttcctacaaacggaatataatgtgtttattaacatactttatttcctgcttcattttccccacttctgggaccaaataaaccatctgcacccaagtgctttatgattagagcctgttttgaacccaaatcaagactatcagttcccctgggcacagtggctcatgcctgtaatcccagcaatgtgggaagctgagaaaggaggtctagaccagcctggacaacatagcaagacctcatttctaccaaaaaaaattgtaattagcctgtcatggtggcacacacctgtagtcctagctacttgggaggctgaggtgggaggatcacctgagctcaggagttcaaggctgtagtgagctatgatggcactcacagcctgggtgacagagcaggaccgtctcaaaaataaataaaccaaacaccacatgttctcacttataagtgggggctgaacaatgagagcacatggacacagggaggggaagaacactcactggggcctgttgggggagggcagggtggggagagcattaaggaaaagagctaatgtatgctgggctcaatacctaggtgatgggtagatgggtacagcaaaccaccatggtacacatttacctgtgtaacaaatctgcacatcctgcacatgtaccctggaacataaaaacataataatattttgaaaaaactctatcaaaaaataaataaataggattctgctatttattctgctctaaagacccatgcacatgtatgtttattgcagcactattcacaatagcaaagacttagaaccaacccaaatgcccatcagtgatagactggataaagaaaatgtggcacatacacaccatggaatactctccagccataaaaaacaatgagttcatgtcctttgcaggaaaatggatgaagctggaaaccatcattctcagcaaactaacacaggaacagaaaaccaaacaccacatgttctcactcataagtgggagttgaacaatgagaacacatggacacagggaagggaacatcacacaccacggcctgtcaggtggtgtggggcaagggaaggaagagcattaggacaaatatctaatgcacgcagggcttaaaacctagatgatgggttgataggtgcagcaaaccaccatggcacatgtatacttacgtaacaaacctgcacgttcagcacatgtatcccagaacttaaattaaaataataaataactaagtacatataaaaatttaaaagactgtccgttctacttgaccactgccacatcaggagcccttgacccttgccagaattcaggaatccccatctctcctagattctaatcaaggaagaaaatcagggactatataaaaaccttttaggtgttggattttaaaaaaagcatttgtgcttggaagaatgggtggagagtggctgaagcccaagatgctgagagaagaaatctggacctcactcctagagaggatagaatgaagtagaccacccccttcttcctccctcccaatgttcattgatggtttcctggtaccagactcattgccacataaagactctaagattttcccaaagcaatcagcactggactccaaaccaacatgactagaaaactggactctgggagtgtataactggccctgccttataccaatttcccagggggggaaatgttatttttgataacattttctatagagtcatatcaaaaagaaaggcttttttcttcctgaatatatcttttattcctccttatctctcttcactcttccttctataactggtttcagaattcccaggagagttcggatgggagacaccaatgtcctacctaccatggctttgggcaaaataattttttttcagaaccacggacagtggcaaaagtttgttcacccagtgggacttttttttttttttttttttgagatggagtcttgctctgtcacccaggctggagtgcagtggcacaatctcggctcactgcaatcttcgcctcccaggttcaagtgattctcctgcctcagcctcccaagtagctaggattacagatgcccacccaccatgcccagctaatttttgtacttttagtagagactgggtttcaccatttttcccaggctggtctcgaactcccgacctcaagtgatccacccgcctcagcctcccaaagtgctgggattacaggtgtgagccaccatgtctggccaccttatggactttttaggtgggtttttccccaacctttgggctcaaattgattttttttttttttttgagacaaggtctcactctgtcacccaggctggagtgcagtggcatgatctcaacttgctgcaaacttcacctcccgggctcaagggatcctcccacctcagcctcctgagtagttgggactataggcacgtccagctaattttgtatttttagtagagacagggtttcaccatgttggccgggctggtctcaaactcctgagctaaattgatccacctgcctcggcctcccaaagtgctaggattacaggtgtgaaccaccatgcccagcctctgaaaataattttaattttaaaaaaataatgacagtgggattggcacctactcatatccccatatgtccaacgcgaagttggtctaccttgttcttgctttgaagctgacctccccacagagttacgatccaagagccaacagtccaacagccaatattattagggaaagtaattctaatatttactaaagcccctaggagaatttcaacaagtatcctacacacgttctgtgtggctgataggaaggattttttttttaagagacagggtctcactccgttgtccaggttggaatgcagtggtgcgatcacagctcactgcagcctcaacctccagggctcaagtgatcctcccacctcagcctcctgggtaactgagaccacgggcatgtgccaccaatcctggctaatttttttaaattttttgtagatataaggtcttgctgttttgcccaagctggtctcaaacttctaggctcaagggattctccaaccttggcctcccaagtagctaggattataggcatgagccaccgtgtccaactccagtgccaagcaggtgatcaagaagtgtttgataggccgggtacagtggctcaggcctgtaatcccagcactttgggagaccgaggagagcagatcacttgaggtttgagatcagtctttccaacatggtgaaaccctgtctctactaaaaatacaaagactagctgggcatggtggtgggcaccagtaattccagctactcaagaggctgaggagggagaattgctagaacccaggaggtggaggttgcagtgagccgagattgctccactgtgctccaggctgggtgaaagagtgacactccatctcaaaaaaaagtgtttgataaatttatttatttaataccgatttattgattgattgatactcttcggagctttccttaatgagccagtttcttccataatgcaatgaatgaaaggacctctcagattcaggcatctgagtgcccgactggagtctgggaccccccagacctctctgcctgggagcttccatgaagctcagcctgagctggaaggagaccgtagggagatgtcctagtgagagtgaatccctagtcactgtttcctcttcttacccactcgatgatcccaaagcacacccatctccaaaagaacaggtcacatgtggcagaggagaaacaaaataattagcatccgcttccttaacaaggagctatggggacgaagtctcctagagtccccagactataaataccctgatgttcccctggctcccccactcacctgcagagtctgggggcgggggggtacacatatgaatccttcccatagacatcaggctaaccccagcgatcacaggtgagtagcccccatgcccttcctaggggtttagtgctgacctcgggatcctctagcagttggtggagaaggaggcttcccgggaccctccccttggtgatgccatcctggtgagcaggtgagggatggggaaaggattgagctgagggtgggggtggagggttgtgggagaggaatctgtctccttcctagaggccgagagagagagaagagactgagaccaagtctagactctctgagtggacaaagcacgcagacggcagaccctctgtggcaggatatgtggaggaaaagcactgagggtctgcagctgcaggacacctgcacagataggagaggtcttgagaaacaagtttctccaatgcagcagctccccaagtgtggtccctgggctagaagcaccagcatcctctggaaactatctagaagtgctggttcttacaccagacatttcagggaaagggcttagctttttgtgtatgatgagtttgggagcgggggggagggggcggggggattgttttgtttgtttgtttgttctttctgtttttgagacagggtctcgctctgttgcccagtctggagtgcagtggcattatcatagctcatcgcagcctcgacctcccaagctcaagtgatcctccctcctcagcctcccgggtacctgggataacagacatataccaccatgcctggctaattttattttcgtagaggcagggatcttcctatgttgcccaggatggtctcacactcccgggctcaagagatcctcctaccttggccccccaagcagctgggactaacaggtgtgtgccaccatgtccagctaattttttattttgtagagatgggggtctcactgtgttgcccaggttggtctctaactcctggactcaagggattctcccacctcagccttctgagtagctgggactatggaagcatgccaccatgcccagcagattgttttattttttgtagatccagggcgggattgggggtggggtggcctcactttgtctgccaggctggtcttgaactcctggcctcaagcaattctcccacttcagcctcccaaagtgctgggattacaggtgtgagccaccatgcctggcccgctttttgtgttttaacaagccttccaggtgaccctgaagcgtgctcaaggttgagaaccgctgctctatgcaacccaagtcaacaactgaggactgttacaaatatgttgccaggaagggaatcgcagtattctatccagcctagagaaaaccaagcattgcattgcaaaaacctcaagtccaacactaaaaagcctcaaaaagttaacatagggctttgctgaaggcctcttggggttaccaaggagattatgctgctaaccttcctaaaaacccctttcatcggctgggcgctgaaatgatgagattactgggctcacgcctgtaatctcagtactttgggaggccaaggtgggcggatcaccgggtcaggagttcaagaccagcctggccaacaggcttagtagaggcgaaaccccgtctctactaaaaatacaaaaattaatcgggcgtggtgatgcacacctgtaatcccagctattcgggtggctgaggcacaagaatcacttgaacccaggagacggatgttgcagtgagccgagatcgtgccactgtactctagcctaggtgacagagtgagactctgtctcgaaaagaaacacgtgtaaatgcttgtaattgaatatttttcccttgcacgtgttgacagcacagaatttagcttcgaaatgcctcataaagaggtgagagtggccattcttagggaggcagtggagtatgagagtgaaaataagtctaaattcaaaggcgagatcaggcacttgcaagctgagtgcccctggcagctcgctcagccccagtctgctcactgtaaattgtagctaacacaatctccctgtgggagttattgtaagacctatgcattaagaaactggctcctggctggctgcagtggctcacgcctgtaatcccagcactttgagagatcaagccgggcagatgatgaggtcaggagttcaagaccagtctgacaaacatggtgaaaccccatctctactaaaaatacaaaaattagccatgcgtggtggtgctcgcctgtcatcccagctactcaggaggctgaggcaggagaatcttttgaacccaggaggcgggggttgcagtgagccaagatcgcgccactgcactccagcttgggtgacagagtaagactccatctcaaaaaagaaaagaaagaaagaaaccggctcctcatcaggataaatagctaatgcatgctgggcttaataccgaggtgatggcttgataggtgcagcaaaccactatggcacacgtttacctatgtaacaaacctgcacgtcctgcacgtgtatcctggaacttaaaataaaatgataaaattaaataaaataaaaatcatgctgagcagccaatagctgggggaaaaaaaaagaaagaaactggctcctaagaaggtttaacccattacagatatcattattgctgagggcaaaataaaaacacctgtcccagctactaggaaggctgaggtgggaggaacacctgagctcaggaggtacaggctgcagtgagctgtgattgtgccaccgcactgcagcctgggtgacagagtgagaccctgtctcaaaataaattaaattaaattaaatagatcttgtattagataattttgcctaactgtaggctaacgtaagtgttctgagcacattgaaggtgggctaggctaagctgtgatgtttggtaggttaggtatgttcaatgcatttttgacttatatatatatatatatatatatatatatatatatatatatatatatttttttttttgagacagagtttcgctcttgttgccaaggctggagtacagtggctcaatctcagcccactgcaacttctgcctcccaggttcaagcgattctcctgcctcagcctcccaagtagctgggattacaggcatgcaccacaacgcctagctaattttgtattttcagtagagacggggcttcaccttgttggccaggctgacctctcaaactcctgacctcaggtgatccccctgcctcggcctcccaaagtgctgggattataagaatgagccaccacgccaggtctgacttatgacattttcaatgtatgaccccattatcagcctcagaacatctgtacctatcatttcttggtggtgagaacataaaattgactctgagtttctctggtatacaatgcattgttattaactatagtcactatgctgtacaatagatctcttgaattatgcctcccatctaattgaaattttgtattctttgatcaatatctccctaacacccacctcccgcccccagcccctggtaaccaccattctactctgcttctatgagattggccattttaaattccacatataagtgagaccatgtggtatctgtctttctgtacctggctattttatgtaacagaatgtccttcagtttcatctatatggttgcaaatgatagaatttcctcttttttccatggctgaataaatagtattccattgtatattcctaccacattttctttatccattcatcggtttttaacacaaaactgatgttaaagattacatattgttggtggaaggatgaaggggaaggagggttgaggggggaggaaagaaaagagggagatggccaggcgcggtgcctcatgcctgtaatcccagcaccttgggagtccaaggcgggtagatcacttgaggtcaggagttgagaccagcctggccaacatggtgaaagcccgtctatactaaaaatacaaaaattagccagtcatggtggtgcgtgcctgtaatccccgctacttgggaggctgaggcacgagaatcacttgaacccaggaggcagaggttgtagtgagctgagatcgtgccactgaactccagcctgggtgacagagcaagactctgtctcaaaaaaagaaaaaggaaaaagaaaacagggagagaacacaggaaaggaagagaaggaaaaacagaagatggtcaggttccctttactgtatagagtttttgttgaggtttgattctgcttgattttctttttttatttttgttttttgttttttgtttgagacagaatcttgctctatagcccaggctagagagccgtggcacaatctctgctcgctgcaaactttgcctcccgggttcaagctattcacctgcctcagcctctagagtagctgggattgcaggcgcccaccaccacgcctgattaatttttttgtatttttagtagagacggggattcaccatgttggccaggctggtctcgaactcctgacctcaagcaatctgcccgcctcagccttccaaagtgctgggattacaggcgcgggccacttggttttgttttctatgaagctttgctccactgaaggaagcaaaagtgtttatagagaacatccaagttgactatgagcgactccgttagatccttgagaccctgactgtctcaggcatgaatgacttggcttgaggagcaacagaagcccactgaagatggcttgaggttaactgaacacaaaggaatttgatggatttgatggaattttcacagaacagtataggtttccgtgggaagctgggaccagaatggcatctctgacacctggctctgtgtggtttttctccctttttgttcccactagtcacagaccatacatggaaccagaaaagcaaaccgaaatctcagaattcttcctccagggactctcagaaaagccagagcatcagaccctcctcttcacaatgttcctctccacatacctggtcaccatcattggaaatgccctcattatcctggccatcatcacggactctcacctccacacacccatgtacttctttctcttcaacctctcactcgttgacaccctattatcctccaccaccgtccccaagatgctagcgaacatccaggctcagagcagagccatcccctttgtgggctgcctcacccagatgtatgccttccacctgttcgggaccatggacagctttctcctggcagtaatggccatcgaccgcttcgtggccattgtccacccacagcgttacttggttctcatgtgctcccctgtctgtgggctgctgctgggagcatcatggatgatcaccaacctccagtctctcatacacacctgcctcatggctcaactgaccttctgcgccggctctgaaatctcccacttcttctgtgacctcatgcccctgctgaagctctccggctcagacacgcacaccaacgagctggtgatctttgcttttggcattgtcgtgggcaccagcccattctcctgcatccttctctcgtacatccgcattttctggacagtctttaagatcccttctactcggggcaagtggaaagccttctccacctgtggcttacacctcactgtggtgtcactgtcctatgggaccatctttgctgtgtacttacagcccacatcccccagctcctcccagaaggacaaggcagccgccctaatgtgtggggtgttcatccccatgctcaacccctttatctacagcatacggaacaaggatatgaaggcagccctggggaagctcatcggcaaagtggccgtcccctgtcctaggccagaacagttattggatgtttatcatgttccaggatcactgttggctgctagggacacagagatgcatcccatcccctaccctggaggagttcagagtctagctgggaacagagacatggaataaatccttccagtacaacgtgataaatgtgtcataaagagatgaacaaagtgtatgagcacccaaaggaaaggtgtgcattttccccaggatttatcttccccaaaaagatcagaatagcaaggatcaaactggcctgaaattagccctcctggaggatcagccttttaggattgctatgtgaataagagtagttgaaaacaagagacgtagctacactcattttagtattgacaaaggccaggtgtggaagctcaagcctgtgatcccagcattttgggaggccaaggtggaaggatcacttgaggccaggagtttgagaccagcctgggcaacatacagagaccctatctccacacacacacacaaaatcactttagcaagacatggtggtatacgcctgtagtctcagctaatcaggaggctgaggcaggcagatcatttgagcccaggagttcaaggttgcagtgagctatgactgcaccactgcacttcagcagtttgggaaactgagcaagatctgtcactcataggtagatagatagatagatagatagatagatagatagatagatagatagacagacagatagatagagaggataagataagataggtagatagggtggatagataagatatgtagatagatagatagatagatagatagatagatagatagatagatagatatacagatagatacatagatagataggatagataggtaggtaggtaggtaggtcaaccgatcgatagatctatctattgacagacagatagatgattgattgatagatagatcatataagtagatagatgatagatagatagatagatagatagatagatgagataggtaggtaggtcagtcgatcgattgatcaatcgatcaacagatagatgatagatagatggatggatagatagagatagaggaggtaggtagatagatagatagatagataggtagatacagacagcccatgtattagccagtgtttcctaagtgttgtggaagaactttgaaaatatttgcaagtgagattagctcacgtgctgttcgcttagtcagccagcaagcctcagcctcctggggggtcttgagacctccacttgtaactatgactgtggttggggcttactttctcaattcccaacaggcttcctgtctccccacaacccccagtcaaggggactctgatgcagacggtccatcaatcgtagtttgggaacacagaccctagcctagctccaaaatctatgtgtttcctgtgacattcatcgcctgactctgaacccagtatgattctacacgcagggtcagccacagcagatcaggtggcccggggcacttaaaaagttagtgttatgggttgaactgtggctcccaaaaaaagatacgtgggaggccaggcgcagtggctcacacctgtaaactctggcactttgggaggttgagtagggagaatcatttgaagctaggagttcaggaccagcctgaacaacatagtgagatctcatccctacaaaaaataaaaatgaaaaaagaaaaaattacctgggtgtggtggtgtgcacctgtcatcttagttactcgggaggctgagacaggaggacctcttgagccaaggaggtcgaggctgcatgagctatgttcctgccactgcactccagcctgggaaacagagcaaggccctgtctgcaaaagtaataataataaaataaaaaagatatgttgaagtcctaaccccaaggacctcagaatgtgaccatatttgaagatagggtgtttacagaggtcattagattacagtaaggtcattaggttggtccctaatctgatacgactggcgtccttatgaaaaggggagatttggacacaggcacccacacacatggagaccgccacatgaagatggaggcagagattggggtgatgctcctacaagccaaggaatgccagggactgcctgcagaccaccagaagccaggagaggcgtggaacaggctatccctctcagccctcagaaggaaccaaggaatcaaagctgctgacaactgatcttttttttttttttttttttttgagacggagtcttgctctgtcatcccggctggatgcagtggcatgattttggctcactgcaacctccacctcccaggttcaagcaattctcctgcctcagcctcccaagtagctgggattacaggcacccaccaccacgcccagctaattttgtgtttttagtagagatgggatttcactatgttggccagactggtctcaaactcctggcctccagtgatctgcccacctcagcctcccaaagtgctgggattacaagcgtgggccactgcacctggcccaacaccttgatctcggactcttaacctccagaactgtaagacaacaaatttctattgtttaagtcacctagttcatggtaatttttaaatttttttttcttttagagacagacaggatctactgtgtcacccaggctggagtacagtggtgcaatcatagctaaagtgcaacctcacctcaaactcctgggctcaagcaatcctcctgcctcagcctcctgagtagttgggactacaggcctatgccactgcaatcagctatatatatttgtagagacagggtctcactatgttgcccaggctggtctcaaactcccggcctcaagagatctgccctcctcggcttcacaaagtgctgggattgcaggtgtaaaccaccacactcggcctgatttgtggtactttgttgcaacattgctagaaaacaaatgcagttagtttaagaaatgtcagcaacctacaaaacctacaaagtgtcccagtacatcctctcaagtttacaattgaccatgtgttctggccaagggaccctgggctagaactggagaaaaggatgaaggatttagattgcatggattcacttactgggtatcagcatgatgacaataatgatgatgacaaccgagatttattatctgaacaatgctaactcctttatatgcacaatctcaataagtgttaagcaacacccctacaaggtaggtgcagaagtaattgtggttttgccactgaaagtaacagcaggctgcgcatggtggctcacacctgtattcccagcactttgggaggccgaggcgggcagatcacaaggtcagtagatcgagaccatcctgaccaacatggtgaaaccccctctctactaaaaatacgaaaattaggccgggcacagtggctcatgcctgtaatcccagaactttgggaggctgaggtgggcggatcatgaggtcaggagatcaagaccatcctggctaacatggtgaaaccccatctctactaaaaatacaaaaaattagccggacatgttggcgggcacctgtagtcccagctactcgggaggctgaggcaggagaatggcctgaacccgggaggcggagcttgcagtgagccaaggccacgccactgcaccccagcctgggtgacagagcgagactcctcctcaatttaaaaaaaaatacaaaacttagccaggcgtggtggcccacacctgtagtcccagctacttgggaggctgaggcaggagaatggcgtcaacccgggaggcggagtttgcgtgagccgagatcgccccactgcactccagcctgggtgacagagcgagactctgtctcaaaaaaaaaaaaaaaaaaaaaaaaaagtttgtaatttaaaagtttgagcatcactgggctagatgggggtcctgtagataaccgggacccaaataggctttaggtacagagatacaggagaaccagatttggggtgccgctctagccactgtgtccaggagggaaccttcccaaccgccctaaaagctctgaaaactacagttagagaagtggccactaggtggcaataatgtcatttcacaaattggatttaaaacgctttttttttttttttttttttttggtttttggttgttttttttttttccccggaaacttgtattctagctgtgaactggcccaggtccatggcccttaggtgtaatctccccctggaagggcacaacaggtgcaaagtttccatgatgagaaggagcctgtgttgtttaaagaaatcacggagactggtgtggcctgagcccagagtgacagggaagctgggtttgcagggggcccgtggagggcactgggagtaacacggtgtgtggaccacggggagtgggaccatgacaaggtttaaggaggatagggggtggggctgtgcttcagaacgaacctgccagttatccatgccatagatctggagtcagcaaactttttctgtcaaggtccaggtcgtcaatattgtcagctttagggaccttaccatctccgttgcaatgactgaactctgctgctgtctggcgaaagcagccatagatgagacatcaacgaatgggcttggctgtgttccactaaaactttgtttataaacacagaagcttccatttcatatcatagtacatgtcataccttgtagcctttgggtttgttttcaaccacttttaaaatgttaaaactactctaggccaggtgcattcactcatgcctgtaatcccagcactttgagaggccaagggaggaggattgcttgaagccaggagttcgagactggagtgggcaacatagtgagacctcccccatctctacaaaaattttttaattagctgggcatggtggtgcatgcctgtagtctcagctactcaggaggctgaggaaggaggatcacttaagcccaggaggtcaaggctgcagtgagctatgattgcaccaccgcactccagcctgggggatagagtaagaccactgtctctaaaaaacttaaaaaataaataaataaataaaaataaatgcaaaactatttttatttcaagggctggatttagcctatgggccataggttgccaatcctcgtatagatggatgggagtgacaagagttaaggggaccaagaaagaccaaaaagtgagaggtgaagtgggctgaaaaccatcagaagataaggagctggtgccacaggacctttgcaaatgctgttccctcttcctgacccctcctgagtaaattcctgcttggcattgagatttcagcacaaactccacttcctcaaggaagcctcccctaacctccatcccttgcccagctacatcagttgccctaatgttacactcgctatcccctctctcatcatcactcatcattagtgatctcttcatcactgcagtggttttgtggggtcttttgttttgttttgagacagagtcttgctctgtctcccagtctggagtgcagtggggcgatcccggctcactgtaacccccacctcctgggttcaaatggttctcctgcctcagcctcccgagtagttgggattacaggcacgcatcaccatgcctggctaatgttttgtatttttagtagaaacggggttcaccgtgtttgccaggctggtctcgaactcctggcctcaagtgatccacctgcctcagccccccaaagttctgggattacaggtgttagctgctgcacccggcctcctcactgcagtggttttatattagtttgtgtaaccctttgattaatgtctgtttcacccatttgactgagctgggagctgggacctgaaatagtgttatcttgtttatctttgcacctctgtgcccctatgattagtacggtagccactcaatgtatgttttctggccacgcaccgtgcctcacacctgtaatcccagcactttgggaggtgaaggcgggcaatcacctgaggtcaggagttcaagaccagcctggccaaccacggccaacgtgatgaagccccatccctactaaaaatacaaaaattagccaggcgtggttgcacgtgcctgtaatcccagctactcaggaggctgaggcaggagaatcgcttgaacccgggaggcaaaggttgcagtgacccaaaatcatgacactgcactccagcctgggcgacagagcaagactcttgtctcagaagaaaaaaaaaaacaaaaaacactttttttctttattttaatttaatcttattttattttatttattttattttttgagatggactctcactttgtcgcccaggctaaagtgtagtggtgtgatcttggctcactgcaacctccgcttcccgtgttcaagttattctcctgcctcagtctcccaagtagctgggactacaggtgcccgccaccatgcccagctaatttttctatttttagtagaggcggggtttgaccatgttggccaggctggtcccgaactcctgacctcaaataatccacccacctcagcctcccaaagtgctgggattataggcatgagccaccgcacccagccacaaaatatattttctgaatgaatgaatgaatgaggcagtgtgatggaaaggttttaggaataccggatggggcagccaaagtaggctgctgagttggaacaaagatacctgcagtcaaggttaagtgagagatgcactcctcctttgatatccccaaccttcagttatgcctgtcccacactcaggtgccttgtgggactgggactctgctgaaattaagaagccaggggcctcatcccacagagcaaaaccagcaagatggcgggactccttaattcagcaacaacaaaagacagaaaataatctggaaattctctaaaatcttagcaagcatgctggaagaggtttgagccaatcttatccagtaaattttttttttttttttttttgagacagggtctcgctctgtcgcccaggctggagtgcagtggtgtgatcatggctgaatgcagcctcgacctcctgggctcaagcaatcctcccacctcagcctcctgagtagctagggctataggcacgcaccaccacacatggctaattttttttacttttttatagagacgaggactcactatgtggcctattccggtcttgaactcctggcctcaagccatcctcccaccttggctcccaaaccgctgggattacaggtgtaagccactgcacacggcccaagcctatattaagagtacaagaacagaccgggcacagtggctcacgcctgtaatcccagcactttgggaggccaagatgggtatattacctgaggtcaggagttcgagaccagcctggccaacatggtgaagcccccatctctactaaaaatacaaaaactagccaggcgtggtggcatgcacctgtagctccagctactcaaggctaaggcaggagaatcgcttgaacctgggaggcggaggttgcagtgagccaagattgtgccactgcactccagcctgggtgacacagcaagattctgtctcaaaaaaaaaaaaaaaaaaaagtacaagaacacttccttctctccatgtgaaattttattgggtgattcaaagcaaatctggagattcgggaactgaggctcagagacgaaaagtgaccaccccaaggccacatgccagatctggggcagagtgggggaatccagcccaggctggtgtgacctcaaaacccagcctctccctccctcatgatgctggtagcctcccaggtgggtgacttgcccaaggtcacactgcagcttggagcaactcaaggcctgtcccgggaggagggagcagcccctgtgtgggactctggggagtgaaaagcggacaagccagcaggagtggccactttctggaaagtgtaagaaagattcactaagatttgggctgaagttcgcagagatggattgggacaatcctcccaactgtccatttgccaggaacttggcaggaaatggaggtggttttgtttgtgtaaacctttgtggctggggatcccaaaggcatccctcacctttaatgatttgctagaaagactcacagaactcagtaatgttattatactcatggtttattgcagtaaacagatacagattaaaatctgcaaagggccagccacagtggcttatgcctataatcccaacactttaagtgagagatgcactcctcctttgatacccccaaccttcaattatgcctgtcccacactcaggtgccttgtgggactgggactctgctgaggcaggaggatcacttgaagccagaagttcgagatcagcctgggcaacatggccagaccctgtctctacaaaaaattgtaaaaattagccaggcgtggtgatgcacacctgtagtcccagctacttgggaagctgaagtcggaggatcactcagatctaggagttcaaggttgcagtgagctagaattgcacaactgcactccagatgaggcaacagagtaaccccccccccttttttttttttttgagacagcatctagctctgtcacccaggctgggatgcagtggtgtgatcacagctcactgcaatttctgcctcctgggctcaagtgatcctccctccttggcctcccaaagcaacgggattacaggtgtaagccaccacacctggcccccattaaaaaaaaaaaatctgcaaaggtaaaaggcagatagagcagcatctaggagacaccaggcatgagcttccagctgttccctcccagtggagttgtacagacatagacaatgctgaattctcacagccacaatgtgtaacaacaggtgcagagtgttgctaaccaaggagctgacccaagccttggtgttctgggttgtttttgtttgtttgttttttgtttttgtttttgtttttttgaaacggggtctctctctgtcacacaggctggagtgcagtggtgcgatctcggctcactgaaacctctgcctccagggttcaagcaattctctgcctcagcctcccgaggagctgggattataggcgcccaccaccatgccccgctaattttttgtatttttagtagagatggggtttcaccatcttggccaggctggtcttgaactcctgacctcgtgatccacccgcctcggcctcccaaagtgctgggaggtgttctgggttcttattggaggttggccactgtattacaatagttcccgcttcttcatgaggtttcagttacctgctgtcaacagcagtccaaaaatactaaatgaaaaatttgagaaataaacactttgggttgggcatggtggttcacgcctgtaataccagcactttgggaggccgaggcgggcggatcacgaggtcaggagattgagaccatcctggctaacatggtgaaaccccatctctaataaaaatacaaaaaaaatagctgggtgtggtggcgggcgctgtagtcccagctactcaggaggctgagacaggagaatggcgtgaacctgggaggcagagcttgcagtgagccaaaatcacaccactgcactccagcctgggcaacagagtgagactccatctcaaaaaaaaaaagaaagaaaaagagagagaaaaaaaaataaacaattagtaagtttttttgtgggtacatagtaggtgtatatatttatgaattacatgtcatattttgatacagggatgtacacatcagggtaaaatgggtatccatcccctcaagcatttatcttttgttttacaaacaatctgattatgctctgtaagttattttcaaatgtacaattaaattatttttgactacagtcaccctgttgtgctagcaattcatacgtttttggttttgggttttgagacagtctcactccgtcacccaggctggagtgcagtggcacaatcttggctcactgcaacctccacctcctgcattcaagcaattgtcctgcctcagcctcccgagcagctgggactacaggtgcccgccaccacacccagctaatttttttgcatttttagtagagatggggtttcaccatgttggtcaggctggtctcaaactcctgacctcaggtgatttgcccacctcagcctctcaaagtgctgggattacaggcatgagccactgcgcctggccacaactcatacgttttaaagtgcgtgccattctgagtagtgtgatgaaatcttgcaccattccactccatcccagctgggatgtcaatcctccctttgtttggcacatctgcactgtaaacaccccacccatcagtcccttactagccatggcagttatgagatcgacaaaacacagtatagctagggttctgtactacccacggtttcaggaatctaccgggcatcttggaacatgttccctgcagataatggaggatcactagtgtcctgggactaccataacaaaataccacagcctgggaggcttaaacaacagaaatttattttctcatagttctggaggctggaagttcaaggtcaagttacgttggtagggttgttctgtggcttctctccaggccttgtaagtggctggctgttccctgagacttcacattgtcttccttctatgtgtgcacacatctgtatccaaatttcctcttctcgtaaggcactagtcctactggattaggactcaccctaaagacgtcattttaacgtaattacctctgtctctagctccggggtatttctccgccaactcaccatgactgccacagaagtgctgagctctgcccaaacctgaccggtccctccacctgcattttgtctttcaacgaatgggtctgtatgtgcctgcgggtggttaacccaccaggtaccaaaagcacagcgtatcaggcctgcagccaacgagaaagaaaattggaggaagaaaaatacatacatgtggggctgggtgtggcggctcatgcctgtaatcccagcactttgggaggccaaggtcgggggatcacttgaggtcaggagttcaagaccagcctggccaatatagtgaaaccctgtctctactacaaatacaaaaattagctgggcgtggtggcacaggcctgtaagatcgcaccactgcactccagactgggcgacagagagagaccctgaaaaaaaaaatagaaaaagaaaagaaagggaagggaaagggaagggaagggaagggaagggaagggaaagggaaagggaaagggaaaggggaaggggaaggggaaagggaaagggaaggaaaggaagggaagaaagaaagaaggaaagaaagaagaaagaaagaaggaaagaaagaaagagaaagaaagaaaggggaaggaaggaagtagagagagagaaagaaagaaggaaggaaggagagaaagaaagaaagaaaaggaaggaaggaaggagagagaaagaaagaagaaaggaaggagagggagaaagaaagaaagaaagaaggaaggaaggagaaagaaagaaaggaaggaaggaaggaagaaagaaaatacatacatggccaggagcagtggctcacacctgtaatcccagcactttgggagaccaaagaggaagagaagactctatctccaaatacagtcacattctaagggaccgggagttaagacttcaacataggaatttggcaagggactgaaggggacataatttggcccatgggtgtccaatcttttcatttccctggaccacattggaagaagaattgtcttgggccacacataaaatacactaacactaacagatagctgatgagctaaaaatcgcaaaaaaaaaatctcatagtgttttaagaaagtttacgaatttgtgttgggtcacattcaaagccttcctgggccacatgcagcctgtgggtggcgggttaaacaagcttgatttagcccataacagccacatagtatggctgaccatttgtgtgactgaccttagctactcagcctcaagcccctcgagaggtcaaactgacacagtgaggcccaaggcctccaccataaaacacgtttttggcataaactctctggtgtgacctccaggtatacaaagagactctcatcacacaggatactccaccagcttgaaggcaactcttcaggagccagacaagggctagactttactttggaatgtgcaggagagcccagaagcatgggaggaaggaggcaggagctaagcctgatgtgggatctctgtcaaagccctgcccacccagccacctgtcctcacctgatcagccacctctctgcaggctgctcctgcttcctctggtacacccagcctgtagagtctagggggtccacaccagcacaccaggtctgggagctggacatcagataagctttgtttaagagacagggcctcagctgggcacggtggctcacacctgtaatcccagcactttgggaggccaaggagggcagataacttaaggtcaggagttctactaaaaaatacaaaatctagccaggcatggtggtgggcgcctgtaatctcagctactcaggaggctgaggcaggagaatcgcttgaatctgggaggcggaggtttcagtgagccgagattgcgccactgcacttcagcctgggcaacaagagtgaaaaccctgtctcaagaaaaaaaaaaaaagagagagagagacggggagagacagggtctcgctctgttgcccaggctagaggcagtggtgcagtcatagctcattgaagcctcaaactcctgggctcaagtgatcctcctgcctcagtctccagaatagctgagactacaggtgtgaaccaccatgtccagcttggagagctcttggcatggctgcagtggccagttgctgagtctatccctgaggctgtgcaggggcctagccagcaggaaagctccacagccttgcagctgataaacagagaccactctggaggtggcatggagcaactatggacccctcctgcacctcagtttcagctctatagctgtctggccagatttttccaagggtcaatgggaggctctggtcaagcaatgctgtaccactgactgtcacccaggtgagactgtgccctgcctcaggaagctgctttatgctaacagaattcataaccatttcattatatacaatcatcccctctccctccagctcctgaatgctactgtgatggatatctctgggcagccacccctttgctggttcctctgaggtctgacttccagccagggaggcctaggcaggctgaggtattcaccttcttctcctggaagatgccagatagacgcaagcctcaggtgtggaaacaaatgggaatgaccacagcgggtggaggaagcttgggtcctgctccccaaaaccttctctatctcccatcccccaggaactgagcaccccagggagctggtagaatggagatgtagccccacagaaccacgccccatgcccatagccttgaaaacagcctaatttattattccctttgcacatgaaacagaggcctagacagaatgtctgtgtttggagtccaccagaagccaaccttgagacaaggattcaagtatttaggaaataaacaggaaatactgtaagtggggtggatatgtgggagagggaagggaaggaagtcagcaaagagtgtattgataaccaggtttctacagtggacagctggagctcaatcccgtgggtgaacactaggggtcagtgtagaacatgaacctcaatcatccaacacaagggtgagggagctggggtatttatccatcaattccccttgactaccacagaggtgctgagctctgcccaaaactgacaggaaatggtcttttggtctttcaactaattggtctatatgtgtctggggctggttaatccaccaggtaccaaaagcacagcacatcagacctgcagccaatgagaacatttaggggaaagaaaacacacacgtggccaggtgcagtggctcacacctgtaatcccagcactttgagaggccaaggaagaaggatcgcttgaggtcaggagtttgagaccagcctgggcaacatagcaagatcctgtctctacaaaaaaaatttaaaagctagctgggtatggcagtgcatgcctataggcctagccactcaggaggctgaggcaagaggattgcttgaacccagaagttcaagtctgcagtgagctatgatcacaccaatgcacaccagcttgggtgacagagggagattatgtctctaaaaataataaggccaagcacggtggctcacacctgtaatcccagccacttggggggccaaagtgggaagatcacttgagcccagaagtttgagaacagtctaggcaacatgatgagaccctatctccacaaaaaaatagaaaaatcagcctgtggcatggtggcacatgcctgtagttccagttgcttgggaggctgaggcaggaacatcacttgagcctaggaggttgagggtgcagtgagttgtggtagtgccactgcactacagcctgagcaacagagcaagaaaaataaataaaataataataataaagtaaataaaaataacatgaaaataatttttaaaaaatttgagacagagtcttagtcacccaggctggagtgcagtggcacgatcttggctcactccaacctctaccctctgggttcaagcgattcccctgcctcagcctcccgagtagctgggattacaggtgcctgccaccatgcctagctaatttttatatttttagtagaaacggggtttcaccatcttggccaggctagtcttgaactcctgacctcgtgatccacccgcctcagcctcccaaagtgctgggattacaggcatgagccacagtgcccggccatgaaaataaatttttttaaaagaaaagaaaatgggccaggcacggtggctgacccctgtaatctcagctctttgggaggccaaggtggatggatcacaaggtcaggaaatcgagaccatcctggccaacatggtgaaaccccatctctactaaaaatataaaaattagctgcacgtggtggtgtgtgcctgtaatcccagctactcaggaggctgaggcagcagcatcgcttaaaccagggagtcacaggttgcagtaagccaagatcgtgccactgcactccagcctgggcaacaaagcaagactatgtctctataaaagaaaagaaaagaaaatgtacgcatacaggctctaaaatctgtacagcaactagcaaaatccacaggaataagcatacaaacatcattatgaaacttagaattcataaccatttcattacatacaatttgcagataatctgttctcacttatggaaatttctgattgctaagaaagaatcagagccaatggtgaattaaataggctacatgcaggcaaataaagacaacaggaaaagtacaaaaactcaaaaagatttacacaaaataataataataaatatttatgtggtatgtgggtgtcatatgggtggggctaagggttgctctcactcccatgtcagaccccagctcctctgagactctgaaataccccattgggaccttagtcctgcagcctctaccctcaacttgtaaacaggtattgtcttgacccctgacttctttccccattgtcaatagctgcctcaaagacatctgcgcagggatctcatagggaggagggtgcactccacccttttacagactgatgccccccaaacacacatatccaagaaaagtgaacagcacctaggagaactgtatatcaacagttgtataatgagtataccaatatatgcataatgagagtcccagaaggagagaagtgaaaggagcagaaagaatatttgatgaggctgggtatggtggttcatgcctataatcccagcactttgggaggccaaggtgggcagatcacttaaggtcagaaatttgagaccggcctggccaacatgacgaaaacccatctctactaaaaatacaaaaattagctgggcatggtgacaggcacctgtaaccccacctacttgagaggttgaggcaggagaatcacttgaacccagaaagcagaggttgcagtgagccaagaccatgcctctgcactccagcctgggcaacagagtgagactccatctcaaaaaataataataataatatttgatgaaataatggccaaaaaacttcccagaagcccagaattgatgaaagacatgaatctacatatccacaaagctcaacaaactccaagtacaataaacacagagaaccacacaaagacacattaaaaccaaacacacacagcctcctcgtccaggcctcttggacaccccctcctatacagacctccatcacctgacacctgatctcctacctgaatattcagcagtgaacaacatagacaagcatcacttgatcacttggtggagacccagtctggacgaggaggcagataaactagaacaaaccactgggactgttaaattcaagttgtggcaagtgttagaagaaaggaaactgagtaatgtgatactgactagacagaggtggtggacagaaagggtctccctagaaggtgccattggacctaaaggatgagagagaggtggcctcagaagaaccagggcttcccaggcagaaggaaccatgtgtgcaaaggacctgaggcagaaatagcttgatatgaaggagaaccagaaaggaggccatggtgagtgaatgggacagccaaagagatgaggctggaagtcttgtgagaccatgctgggaatctgaattttattctaggtgaggtgagcagtcataggaacactattcagcaggatggtgccacaatctgatttcagttttaagtccactgtgggtaatatatggagaatgaaatgtagggctaagacaggttatattttcccagatggccacaatatctcccaccctacatccacttgtacaatgtcaccttgacatgcctcccatgtagagaggtataatctgtgccccctttccttgaatctggtggcagaagtgacacagcatgacactcaaggctgggtcagaagagatgcaacttcttccttgttcacttttagagggctgggtggctgtctaagaagtctgactaccccaagaccaccatgctggaaggaaacccgaaccacacggagaggcctgtgtagctaccctggtccacagccccagcaacagctggcgtcagttgcaagacctctgagtgaagacacctccagatgactcaggaccctgccattttttagtcaccctctagcctaagtctcccctgtccaaactgaaccacagcatctgtgagcatcatgtaaaccaaaaggtatctcagataagtctcaataaatttagaaagcttattttgccaaggttatggacatgcctgtgacacagacttagaagctcctgacaacataaactagggtagtcagggccactaccttgattcaggtctgtaatcctagctacttggtaggccaaggcgggcagatcacttgagaccaggagggttttttgttttgttttgtttttttgttttgtttttttgagacggagtttcactcttgttgcccaggctggaatgcagtgacacaatattggctccctgcaacctccgcctcccgggttcaagagattctcctgcctcagcctcccgagtagctgggattataggcatgcaccaccacccccagctaattttgtgtttttagtagagaaggggtttccccatgttggtcaggctggtctcgaactcccaacctcaggtgatccgcccgccttggcctcccacagtgctgggattagaggcgtgagccaccgcacccagccgagcccaggagtttgagaccagtctgggcaacatgatgagactctatctctacaaaaagtagggaaattagccaggtatggtgacacatgcctatagtcccacttgctcgggaggctgaggcaggagcatcacttgagcccaagaggctgagactgcagtgagctgtggtggtaccactgcactccaccttggtctagttttatatattttagggagacatgagacagcaatcaatatatgtaagatgcacatgggtttggtctgggaaggcaggacaactcaaaagtagggagaaggcttccaggttataggtggataagagagaaacaattgcattctttcgagtttctgactagcctttctgaatatgcaatttacagagatagtcacttatgccttagtctggcttagtgaaacaaataggtaaggaagcgatcagatatgtgtttgtctcatgtgagcagagggacaattttgagttctgcctgtccttcatccataaggaatttccttgtaggcaaattgtgggggaggtatgtagctttttttttcttttcttttcttctttttttttagacggcatcttgctctgatgaccaggctagagtgcagtggtgcaattttgattcactgcaacctccacctcccgtgttcaagcaattttcctgcctcagcctcccaaatagctgggattaccagtgcccacccaccatgcctggccaattttttttctttttcatatttttagtagagatggagtttcaccatgttggccagcctggtttcgaactcctgacctcaagtgatccgtcgcctcagcctcccaaagtgctaggattacaggagtgagccaccgcgcccagctagcttttttaaccttgtagctatcttacttaggaatagaatgggaggcaggtttgtcctacacagttaccagtttgacttcttccttttggctcagtgatttggaggtctcaagatttattttcctttcacaatcacgacatggttgttttacatcattacgtttggggatggtttgtcaaacagcagtagtaattggaatttggaggtgagagaattgagtggggaaagagtggcatggggagaccaaggaagaagcttggggtggggtgggtagtggggacggtcattgaaacgaatgacactacggcttgcaccaggttgaagcagtacctggcaaggagagagaggatacgtggaggctgcgatttggagacagacccaagagaacttcctggatgccatcacccagagtcccatccagggagggtgggtgaggtggaagacaagggatcgggcctgcgccacgatcgtcacgtcccatcgaagctggagcggatccgggcacccggagcccccattccaacccctcccggccccaggcaactacatctcccagcatcgcccgctcgggccgcgggaaaggggaaaaaaaaaaaaagtttgggccaagcattcccggaatgtgcttcctgctggcgcggggcggggggcgggcggggaggcccgggcggggcggggagggcgcggggcggcgcggccggagcccggggcgcgcactcggctcggcccggcccgggccgcagcatggccgagccgctactcaggaaaaccttctcccgcctgcggggccgggagaaacttccccggaaaaagtcggacgccaaggagcgcggtaagcggagatcggtggggaacagggggcgccgagccccacccggcctgggagcggggtcccagggccccgaggacagacggtgggggggatcagggggagccccccgcaccccgctgcagactggggtgcctccagccaggggagggtaggggtcctggaaggaaggggctgggagggaggggggcgcggaccgttatgtgctgctggccggggatgccagcgctgcgggctccttgggaggcccgggagggggcctcgcccacgacaggaaatggggccgcgactgagggcctggagggtggaggggaggaggggctgggaggccgggacactggggcccagtcgggctgggcaaggggcatcgggagccctggaggcgcaggatgggagatgggaggcgtactcctgcaaaggaaagagaggggcggcccgtcaatcagagtagctgccccctccgcctcccacctactaacagtgacggcaactgcgcctgccttagccccaggaaactgtcccttttatacagatggggaaactgaggcacggagcaattgggtcatgtgcccagggccatcgacttaaacagctctttggactatgctacaaacagagaccctagagggtggacatcagaggtggccagaggaggagttcagcagggtagcaagtaaaaaccttagagaaacagctgcgtgggatagggggacccaggaaggaaggagttaaaggaggaaggccagaccattccatggacgtaccccttccccccaggccttcccaaagattcccaatgttcccagggaagggagaagggacagagatgcccaaacacaaacacacacaggaaacagcccaggacatgagacaggagaggagggagggaaggggaagtcccaaagcattgagcgtggggggtctggcctgggctgagggacaagggcccatcccaggatggcgacagagtttggaagacaggagggagggtaaaaggggcaggggactgggagtgactgtgctgcagggaatagaaaacccagctcctcactcctgagcacgtagtgcctgctgtgggctgtatacttttccaaaaggctcctggaagcctccctggacatggaaatcacatccccccatttcacaggaggatactgagcctcagagagggaagcgacttgcccaaggccacgcaggtgcaaagctccatgccacggttattgagagggtagaggaagtggagactggaacgcagtacctacgggccccaggaagcctgacttagaaccctgaggctgcagggatggagtccccttttgggatgccagggactgagtagggggtgctctaagctgataactgagatcgctagcctgtggctgcctattccaaacaaaacagcaggatccaaggaaccatgacttatcaggggccggccagggccgtacacagcatcccacccactgatcaattgcacagggctgctctgcaggcagtgaggggctgggtgggtctcactccccttgctctctgccaggccacccagcccagcgcccagagcccagccctccagagccagagccccaggctcccgaagggtcccaggccggagcagaggggccctccagccccgaggcatcaaggagccctgcacggggagcctacctgcaaagcctggagcccagtagccgccgatgggtgctgggtggggccaagccagctgaggacacctctttagggcctggggtacctggcactggggagcccgccggcgagatctggtacaaccccatccctgaggaagaccccagacctccagcacctgagcccccggggccacagcctggctcagctgagtcagagggcctggccccccaaggtaagaacaagcttcccatccccttccccaaggtgagcaccagctccacatcccttcccttcagggtagcaccagcctcacactccctcctcccagaggagcaccaacctcacactccttcccttcaggggagcaccagcctcacatccccaccccgtcagatgctcccagaggagcatcagcctcacaccctcctccccgccaggggaacaccagcctcacactccttcccttcaggggagcaccagcctcacccccctcccctaagcccaggttcctggaccctgaagtctgctctccacacaggtgcagcccccgccagccccccaaccaaagcctcccgcaccaagtccccgggccccgccaggcgcctctccataaagatgaagaagctgccggaactgcggcgccgcctgagcctgcgaggcccccgggctggcagggagcgcgagagggctgcccctgcgggctccgtcatcagccgctaccacctggacagcagcgtggggggccccgggccggcagcagggcctgggggcacccggagcccgagggccggttacctcagcgacggggactcaccggagcgcccagctgggcccccatcacccacctccttccggccctacgaggtgggtcccgcagcccgggcacccccggccgcactctggggccgcctcagcctgcacctgtacggtctcggggggctgcggccagcgccgggggccacccccagggacctctgctgcctactgcaagtggatggggaggccagggcccgaacagggccactgcgaggggggccggacttcctgcggctggaccacaccttccacctggagctggaggccgccaggctcctgcgcgccctggtgcttgcgtgggaccctggcgtgagaaggcaccggccctgtgcccagggcaccgtgctgctgcccacggtcttccgaggtaggacatgcggctgcaggggaggaggggcagggacccccaaaccccaccgccaccccccgcagagtgcctagggggctgggctccgggcggaaggtgtggcctggagcagcgaggccagggtacatgaagcttcagagcacacccggctcaggcccccttgtgtcctcagggtgccaggcccaacagctggccgtgcgcctggagcctcaggggctgctgtatgccaagctgaccctgtcggagcagcaggaagcccctgccacagctgagccccgcgtctttgggctgcccctgccactgctggtggagcgggagcggccccccggccaggtgcccctcatcatccagaagtgcgttgggcagatcgagcgccgagggctgcgggtgagcacccaccccaccccaaccctctggcccccagacctcagaccactcttcaggacaccctatgtacagatgccagacccctacccccaggcctgagccactcctagctccaatcccaacctagacaagggcagaaggcgcccccttgactgtagcaccctgggcagaacccatgggtcatccattgatttaaaaacaggatccaagccctcctggggctcagagtctgatgggggaaaagatacgactctagtcattcacaaatgtaaaactataactgggactggagttggggtggggtgtacctagggtctgggagagcttaaaacaaaacctggggtagtcatggaaagcctcctcaaagaagtgtcagtttcctaagtcaaaggagatggcagccaagacaagtagtccaagcagagggtttacaaggccaggttgtcaaggtagttccaacctcccagcccacaatgcccattgctgcctggcccagaattccagtgctcaccccactgggccctgattagtctgtggccccggcaagaagacattcactctctcttcccacccccaggtagtgggactgtaccgtctttgtggctcagcggcagtgaagaaagagcttcgggatgcctttgagcgggacagtgcagcggtctgcctatctgaggacctgtaccccgatatcaatgtcatcactggtcagcatggccccctctcccctgcctgctcacccccattcaatgcctcacttcaaggccttggggctcctctgggacctcagtcctcctatctgaccttgctttcacccacctcctcttcccccttagctgtgccctccttagccttagaagccagtggtgccctgaccagaggggaccctgtgttcacaggcatcctcaaggattatcttcgagagttgcccaccccactcatcacccagcccctgtataaggtggtactggaggccatggcccgggaccccccaaacagagttccccccaccactgagggcacccgagggctcctcagctgcctgccagatgtggaaagggtgagttgggcctggtgggagtgatgggacttgagagtgggctgataccaatagaatgtttcacccatgcctgggcctgagatgggcatgagctggcagcatcatcatatccccaagaaataggtgctattagcatcccacttcatagatttggaaactgaggcccaaagcaggtgacagttgcccaaggtcacacagccaggatgtgtcaaaaatgcaggctgaacgctgatctttcaacctacaagggaggttcctggctgagggaacctagacaagtcccatccctctctgtgcttcaatatcttcatctgtaaaatgagattcatggcagctctgcttttccaatgcttagttgcctttggcttcagtcttccctccaacaaaataggctcataatactaacatctaatgattaatagtcttaacccgaccacatcccagctatgagactgtgaacctgcttccctactctagccaccttagtctcttgcaggtaggtgccacaggggcctgactttgtctgacttacatcctctcaaccctctcccaggccacgctgacgcttctcctggaccacctgcgcctcgtctcctccttccatgcctacaaccgcatgaccccacagaacttggccgtgtgcttcgggcctgtgctgctgccggcacgccaggcgcccacaaggcctcgtgcccgcagctccggcccaggccttgccagtgcagtggacttcaagcaccacatcgaggtgctgcactacctgctgcagtcttggccaggtgagttcatgcccagggcctgcaccaccaatctgagccaggctgctacagtgatgccaccttaagggaccaatcagtgtcttaggcttgaagctacgccccctcatggagtaaactggtacctggttgcctcagcaaccagttcagatccaaccaatctgtctgttttgtctttttttattttcatttttttgtaaagacagggtttctctatattgcccaagctggtctcaaacgcatgatctcaagccatccttccgcctcagcctcccaaagtactgggattataaaccaaatcaccttgccccacagagctgattcatctttttatttttattttttattttttttgagatggagtcttgctctctagcccaggctggggtgtggtggcatgatctcagctcactgcaacctctgcctcccaggttcaagggattctcccacctcagcctcccgagtagctgggattataggcacgcaccaccagtcctggctaatttttatattttaagtagagcagggtttcactgtgttggccaggctggtcttgaactcctgacctcaagtgatccacccatttcaggcctctcaaagtgctgggattacaggcatgcactaccaatcctagctaatttttgtatttttagtggagatggggcttcacggtgttggccaggctggtcttgaactcctgacctcaagtgatccgcctgcctcaggcctcccaaagtgctgggattacaggcatgatccaggcatgatccacagacctgcccctacccatctttgatgcagtcagaggccctgcctcttgacatgccaatcagaggcctagttgcgtaagcaaccagtcctagctctgccagtgaaaacctgaaagggtcgaaggccgctttccacaggccaatcaggagcctagttccctaagcagccaatcagaggtcggctgtcgcctctttctatgacctaccctgtctcccttcagatccccgcctgccccgacaatctccagatgtcgcgccttacttgcgacccaaacgacagccacctctgcacctgccgctggcagaccccgaagtggtgactcggccccgcggtcgaggaggccccgaaagccccccgagcaaccgctacgccggcgactggagcgtttgcgggcgggacttcctgccctgtgggcgggatttcctgtccgggccagactacgaccacgtgacgggcagtgacagcgaggacgaggacgaggaggtcggcgagccgagggtcaccggtgacttcgaagacgacttcgatgcgcccttcaacccgcacctgaatctcaaagacttcgacgccctcatcctggatctggagagagagctctccaagcaaatcaacgtgtgcctctgagccagatgacggggtgggaccccggttagtaaggaccgggcgcccagtggctaaggcggtgccctggtgaccaaggagagccagacctgttgctcaggccgagctcctggttgccagcgagttaccacgggaccagtcgcgtgtatggctgagactcattcccagtttccagggcccggtatttggacactagttgccaagtctggggcctggggattttagggaccagcggttgtgaccatctttcctgagcaccaagggcttccccttttgttgccaaaaaggtagttctcgcgcttgctaggctggcctctcttgcctccccttggccggggcaacaccagttactgtgagcatcaccctggtgtggtgagtcacctctagtcggccctcttgctgctgccaaccaaatcagtattagctttgagcactgcactgtttctccctcccttggacgacacaaagactagcatgaggcactgtttgtggggggcagcccctatcctgggttccagcatggacacaggggtagcctggggcttatagagaaacagctggtttcccctacccttttccggggaagtccccacgattggcctctagtcagcaaatggagataacagagtctggcctttccaatccccatctccttgccccccccttgcccccccccccgaaaaaaattgagcacttaaacccctcccttttggagggggccccctgaagcgtcaggctgggggcagtctggtacggaacatatttattgcctccatgcatgtgtgtgtgtgtctgtgaggactggtgtgcgtggacacgtctgaagcaggcgtgtggggctctttcagggaccacagaggagggagcagtttgcagtgcccagccaccctgaaatccccaataatggtgcctcagtgggccccagagttccagtgggagagtacggttccctcctgtctccctcttcttttccgcacctccatctttgtggataataaataaatatgcacaggttctgagactgagtacttgggcctacatgggccagaggtggtttattcagtctccataagagaggggacaaacggcacagttgggtccgtgaagaggagggtccaagagctcacaagagagcctctctgagatttgacccctccatcccctcctcagggaggttgtggagtcactgggcctcatgggataggcccagggcaagcaatgatgagactccaaaccagctggacacagtccaggggcaggaaggcagccaagcgtcctgacccacaaggccctatacagcaatggagccatcgcggaagtccgtcctcccaatgaggatgttgaccacaaccgggtggccgtctcggcactgctgctgggcatcgtgcagcaccttgaccacctgatcctcgttctcccgtgagagcagcaagccccgggcccccagacccatggctgccttgtgataatctaaaagaagagattaagtcggatagtggcaaggactcagcccaccgcacatgcagccagcccaggagaggaacacaagcccagctgggactgaaacagcctcctgtcctcccaacctcgctgaggccccctcaccagtgtaggccaggccacaggccacgttgctgcccagagagggcacctgctcccgagaaatctgtgtccagccagcatcattccctaccaaggccatcactgggatctacaggaagatgatgaaggcaggccgcagccttcagccccatggcttggccagccagaggacagagacagggatagggcctctgccagagaggaggctccctccccacctcagcccacccctggtgacatctcccagaaccccaggccctaagcttccctcaggccagcccagtcaccttgtgtctgacgaatgtatcaaattcgatgaggctgtagccaaaagctccgtccccaaacaggcaccagacctagtcgggaggggacccaggatggttagggtggatcaggacctagagagcagcaagtctcccaactccagtgcctcacctcagcatctggccggcacagcttggccccaagtgcaaatcctgcaccaactcccagagtcccaaaggcccctaagaggaccaagagcaggtgggtgtgaaggcgtcctgatggatggtgcccactgccccaggcgggggcccttccttaccaggatcgagccagcgcagggggccgcggggctgtaccagatgggcagcagtgcccacgaagtccccgccatccaccaccagaattgagttgtcaggtagcgtttcctccaccagctgcagcacctgcactgggttcaggtgctgggccacaggcatcgctgccttctccctgcgacaggacagcgaaggtcaccagggttggcagcagggtctgccgggaacccccttcccacatccactccacccaggccccaccgaaaggtctgctccttctgccggtcggcttcccgcagctcctccacccagtctggggcccaggtctggccctgaaggccctccactaacttcagcacgaaggaacccacatctcctggggaaggaagaggacacagctgtggggagctggcttcctcctgttcttccagcatcagaggcctcaaaacagcaggaagccagcagcagcatccgagcaggcagacgggaagcaggccaggggtgctcctagaaaaaaaacaggtgaaacaccccagaacctgccagaaccaggggagggcagcccaggtgaaaagggaagacaaggcccaagaaacaagggttaaggagcacaaggcaggtgacaaacccaagctggcctcgtcccctccctccacctccttctgcctgggaaacactcaatgaaaagagctacatccaccaagcacatctctcaaatccaggcacgtggaagcgcacagcgaacgttactgaagtgaactaacaaacagccccgtgatgtatctttcaccaccccatttttcaaatgatcaaatggaggctctgagaaggtgaggctctgccgctgttcatctccagttcaggcctcctcgcttctgtcctggccattttgagcagcccccctggcctccacccagcccccttccggcctgccgtccatggctgctgagtggaccttcccaacacagatgcaacggtgctacttctctgcttaatacaagagtgtcctgtcgcctaggctgcaggggagtcaacatcctcagaatgatgaaccaagttcaagtccaaggggactaaaataaggggaggggagagatacggcaggaagacaggctaaggggccaacgagtgtgctctctgtcctgagggcagtgggcagtgtgggagggaacgtgatcacatgcacgttttcaagcctccctctgtgtccaccccaccatttgttcctacagaagcatctatcaggccgggcgcagtagctctggtctgtaatcccagcacttttgagaggccgaggcaggaggatcacttgaggccaggagttccacgccaacctgggcaacacagtgagatgctgattccacaaaaaaaaattaacaaattagcctggcatggtggtgcatacttgtagtcccagctactcaggaggctgaggtgggaggattgcttttgagcctgggagtttgagggtgcagtgagctgtgattgcactactgcattccagcctgggtgacagagcgagacctcgtctctaaaaaataaaaataaaaaaaatttaaagaaagaagcattcatcagtttgagagccaactatttgtctctggttgactggctacccctagggcaaggtctgggcctcaatcactgtaccaggctcaagccagctgcagcagaaaccaggaggagagggactgggaggagcacatatgtgtacggggggattaaggggctcaccctgcacagcctcctggggcttccagaagatgtctgagttgagcaacatctcttcccgattacgattgacgatgatgatcttgctgctgtggctgaggacacggccataggataggcggaagtcacacacagttcctggtgtgggggacaggaatgcagtaggcagaggccccatgtcgtctaccttacttgatccactgtggtggactggatgcaaatgagtccctgttcctcaccgagtctccctgcacctgtgccacctacagtgaccttgcagctccccacaccccctgaatcgggactggcctcatgacatgctttggccaacaggatagggcagaggcaggttatattttcccagatggccataatatctcccaccctacatccatttgtacaaggtcaccttgacatgcctcccatggagagaggtgcagcctaggtcccctttccttgaaagtgacacaccatgacacccaacaaggaagatatgcagtttcttccttgttcacttttagaggcctgggtggggccaaggaatgtgctctctgtctaagaagtctgactaccctgaggccatcatgctgggaggaaaccggagccacacatagagacctgtgtagttgccctagtccacagcccctccaacagctggcgtcaattgcaagacctctgagtgaagacacctccagatgattcaggacccccaccccccattcctgcagactctacttcaagaagccacacagcctccactcactctcttgaataaccgcactctcctagccccatagttttctcatccttcaccaagtcggccagcccaggctagcctactggaggatgagaaacaagggggccatggagacaggggtgaagaactctatgaccccagctgaggccatcccagacgagctgcagggccagccaatccccatacaggtgagcaagcccagcctggatcagcacagctgccttcctgcctaacccaagtgcagactcatgaatgagcccagccaaaaccacagctaccacctaccttataggtggatcttgagaaatcagaaatgcatttttagccattgagtttggggatggttgttacagggcagtagctatctgatacacctattatgcgtctggttgggttcaaagcgctttatgtgaaaatgtgtatcaagtacaataggtgcccactagaccttcctcctccttcgtgtgaagctgggtaacagggtgagggggttcctgggggaaggagggaaaggaagaggctcaggcccacctgctaggacaatgacatccgccttcttcagggccgcactgcggttctcccggatgtggagggggtggttgcggcctaacagcccccgtgccatccctccaaggaagcagggaacacccaaggtctccacggcagccctgggagtccaggcagagcagaggtcagtgtggccggggcctcccgcctccccaagagcacccgaggactggggactgggaacgtgaaaacaagggcagggctggcgcttctcaccgaagcttgtcggcagacgttggggtgagcagggcctgactccccagcaccatcagaggcctcttggcccggctcaggatctccacacagcgctgaacctggagcgagaggtggggatcaaagggctgtctttttatttatttatttttttgagacacagtttcactctgttgcccaggatagagtgtaatggcatgatctcagctcactgcagcctccacctcccaggttcaaacgattctcccgcctcagcctccagagtagctgggattacaggcgcgtgccaccatgcctggctaacttttgtattttcagtagagacagggtttcaccatgttggccaggctagtcttgaactcctggcctcaagtgatccgcctgcctcggcctccctaagtgttgggattgctgctgtgagccaccgcgtccagccaaagggccgcccttgagtcgccatgagcacccaagattaaggccccagtactgactcagggagagggtcagggggccctctcccctcagggagagggtagggtcctcagacacaaaagagaggcaattcacctgctgcggggaagcctgggggatgtccaggggcagcggtccctcgggctgaggctcccaggctcctgcaaagaggttggccaggtaattctctaaatacctgcaaaagggagggggaagaaaccaagttgccagaattaactaactacaaggattccaggatctgagcaaggaaaggggccgggagaaaagccaggagcaaagtggcatggggacagggtggatgagtgacacctcagggacagacgaaccctagtggccaggtcttcaactgcctgtttgccctcggtagcctctggggtccaccccaactccacgtagccccccagaagcaaggaacgcaggctcagcatgccaggattaagcctgtgggtccaacagatgtgagctcaagtcctggctctgtcacttcctagctgtgcaacttagggcaagtgacttcacccttctgagcttccacctctgtcaatgtaaatatgaacctccctccccaggttcaaggatctgtccacttaggacatgaggcgctttgcatgggagttctgaacactgtcctctcctgcttcaaacagggtcttctcggtctccttgctcactgggccccagggccccaactttcctgaaggacctgtgcagggccctggagacacaaagatagatcctgcccagccctcccctcagggggcgctctatccagcgaaagacagacacatgggcattggcaggaaacagtcggagctcagagtcagaagcctctgctttcaccgttaaggacaggccaagacagcacagaagcagcccaggatggaaccgtgggaagccccgcaagtaaagaaaaggcaagggaggctgaggcaggaggattgctcgaggccaggagttcaaggctgtggtgagctatgatcataccactgcactccagcctgggtgatagagtgaggccctgtctcaaaacaaaacaaaacaaaaaaggcaagataagagatagccttgtgagaggcagcccaagagagaggggcaaggagaacaaggggagggactgactgggaagccagggggcaaagtgcattaagaatgaggctatatgaccaaaatggtgaaacctcatctctactaaaaatacaaaaattagctgggtatggtggactgcacctgtattcccagctactccgggggctgaggcaggagaatcacttgaacccgggaggtggaggttgcagtgagccaagatcgcactactgcgctccaacctgggggacaaagcgagactccgtctcaaaaaaaataaagaggccatagaacaaaatcactactgcctgagctgaccctcaggcgcttcacacacatccggagtacaggagcctgactaccttgtccactgatgatgccccgtgcctgtcctggaacctggcacatggctgccgctcgctaaatgtatggaaaggaagggccaaggacaggcaaagggaagggactgaggggaagggagagaaggaggaagaagaggaagaggaggaggagaagaaaggaaaggaagaagaagaagagaagaggccaggcgcagtggctcatgtctgtaatgtttgagaggccgaggagggtggatcacttgaggttaagagttcaagaccagcctggccaacatgatgaaacctcgtctctactaaaaatacaagtattagccaggtgtggtggcgggcgcctgtagtcccagctactcagaaggctgaggcaggaaaatcacttgaacccagggggaggcggaggttgcagtgagccgagatcacgccactgcactcaagcctaggcaacagaacgaagaatctgtttcaaaaaaaaaaaaaaagaaagaaaaggacaaagatgtgagggaaggaaaggaggaggaaggagagggctcgagtctgggctctgccacttttttttttttttttgagacggagtcttgctctgtcacccaggctggagtgcagtagcacgatcttggctcactgcaagctccacctcctgggttcacgccattctcctgccgcagcctcccaagtagctgggactacaggcgcccgccaccacgcccggctaattttttttttttttgtatttttagtagagatggggtttcaccatgttagccaggatggtctcgatctcctgacctcgtgatctgcccacctcggcctcccaatgtgctgggattacaagtgagagccaccgcacccggcctgggctctgccacttcttagctgtgtgactttgggcaagtgacttcacctttctgagcttcctcctctgtaaatgtaagaatgaacctcccttccgaggttcaaggatcatcctttaggaggaggaaaacggagaggacgatgggaaaggtggtgggggaaagggaggagaagaggaaggaagagggaggaggaagaggaggaagaagagatgatggaggaggagaagaaagggaaaaggaggaggaggagggctgtcctgagcctctcccctttgctgcctccacgagggccgccttgctttccctacccacccagttcattcctgcctcaggacctttgcacatgctgttccttctacctggaatgctctccccccagctgtctcctcccagtccacatgtgaatcaaaggaggatgggtgtgggctggaagctgcaggagagaacgggggataaaggagggaatggcaggggtggggctattcaccaggagaccactcggcccacgaggcccttgggtggcttggctggcaccatctccttctggaccatgaagtaggggtacagcacgtcaacgggcagctccacaaacaccggacctgcagggacagggaggacgctgagtccataacatgtccccagcccctcggccccagcactgctcagcatcaccatcctccacctacctggggtgcccgactgggcggcagccatcgcggccctcagggtgggcacaatgtcccgcaccctccgcacagacacacaaaacttacagagtggccggaaaagggacagctgatcaacagcctggagcgcaccccggttctggcaaagacagaggtgtggcagggttatcgcatgagcccttcaagcccccctaggcccccactggcccccaaggactgggtacctgcagcagagtgctggcagccccacccagaagcaggattggggactgagccatctgagcattcttcaccgcagtcaccgtgttggtgaggccagggcctgctgtcactgccgccacgcccaccgtccctggaacacagagcccatcacagccatgcccactctcttggccattcttccacctctgaaaaacccctaccctcacagacactctagcccacagtccaaccagtccccagccctctctgcaatgccctcaccggacaggcgggccatagcatcagcagcaaagacggccgtgacctcatggcgtgtgtccaccacacggatgcccagtttctcacaggccaccagcagcggggaaatgtgcccaccgaccagcgtgaagatgaaccgcacaccatgggccctcagcacagcggccacgttctctccgccatgccggacgcttgccttgtccacctgggcccaaggacaggtggagcaataaagttaaaggccagggcagagggcagctgggaaagggggcaatccccctgccccaggtaagggggcaggagcagggtgagaggtcaagagaagcttggtcttggttaggcatatattatactacatgccaggctcaaaccaaggcataacatcttatcagatcctcttgtcattacatccctcttacagctgaggacatcaaggcttgcccaagtaagactgaaagttcaatagaacccacgctcttaagtgccccactgttacactgcctgtctccaggatggcagggcaatcagggagagaggagagggttatataacccagggggtttggccaggggcacaacgcacgcagagcagatggcagggagccatctgctgtgactcctccctgccctccagtatccttgcagagcctggcagctgggctcctgatcccagcctccctgatgccctcctgatggacgctaaacaggcccagggcttagttgacaggctgccagccaccatgtgcctggcacgggagtgagctgctggcacagactgtgccgaggcctcccaactccagctgcctcacagccctacacatccaaggcttgctttaaatctcctaagtcctgaaggtcagtggcatcactcctggctagcagaggaagcagtagagaagggtttggggagggagaggtcaagcttggtccctgctaggagagaaagggttgaggaaggggtctggagaaggggtaaatttcaaacagaggtgcaaggagtttagggggacacctgtggggtcagctctctccaaacatgtcacctagggcaaaccaccacacaatctctctgagcctcagcttcctcttgcagaaaatgaagacagaaagaacagcacctactttcaaggaaaaggtaaggggtaggtaagaaagtctacagtactgagctcagcagagggcaactgttatgaaactgtcactgccaccccctcgctggagcctgccctctgccccatttatcccatccaggttagggagcacagagtgctgtccatctgttctgtgaaaagagtcactggggaaggaggtaggtggggtgcgagtgccccggcagcggcagcttccgtgttctctcttaccagtggcaaagtccaggcctccatacacagcgtggcaatggagacagggccctggacagaacctcttaccagtccctctggactagtcggggctcgctttcccaccctgcacaatgagtgagctggaagcagcaccacgaggcccctccctctttgactgcccccagcccacctcccattctgtgccccgcaccttgtgcagcagctgatagaagagccccaggcggtgagcggcgcccagcaaggcggccaccagcgtcccgcaggccaggagcaggaaggaggggaataagctcccagcgggggcggcggccgcgggggtctccatgaggtggtacctaagagagaaagggcacttcccagacttgggcgcgacagggaacctctccggaagaaatcgcgccccttctcgcagcaggatccagggccacgacccttgccgccagtttctgtgcggccacgcccccaaccctgccagaccacgccctttgtgcgcctaggctcggggtgaagccatgcctctccgtgacaaggtcacgcccctcgcggggctagccccagtcctttacatcaccaccactcccacccaaactagccaccacaagtcaaggtggcgacgacagcaccacacagttatcttccacttacctacttgtcaatggacaggcggaagccccgcctctctttccacaaccggaccccaaatctcagccccagtagtgagcccgccccatgttacgtcaccaagaggcacgaggtcacgcccccgggttagcgggcgcgaccctccacgcaacccacgcctctcccttaaagagcgcacgggcccgagcctgatccccgaccccgggccaggctgggtcgaggtcacatcgcatcaggatgtggttctcccacaccagctcgacccccgacgctattcaccttcacctccaggatatggcgctgcctccagcagaattcggccccctccgtgtcacgtgacccgggagcgtggccgtgcccgggtggcccacttggctcagcggcgccccgtagtccggcccgatgcgcatgcgcacagtcggagccccgctccggggccacccgaaagagccttgcctctactggccgcctccctcatagaccccgcctccccttgcctttcattggctcgcactgcagacctcacacccattttatgttttaaaaccaggaggccacgcccctcagcggcttcaggagcccagacctttgggggcccaccttccgcagctttccattggccccacggtggaagcccgtaggttcaggccctccgaacacagctcgctttccacaccagcggggccgtaccagagcaagaccatgtctcacaaaataataataatacttaaaaaatggtaaattttatgttatgtatattttccacactataaataaatatttgtgcatgtatatatatatatgtgtatattttttgtataataggtatagtagtaagcaaaggaaattcacactgagtcacattctacaaaatgcctaaccagacctctacaaaactgtcaaggtcatgaaaaacaaagactgaggcactgccacagactagaggagggaaaggagctgtgacaactaaattcaatatagtaccctggactggatccaggaatcaaaaaaaggacaaatttgtggataaagttggtgaaatccaaataaagtttggagttgagttagtagtaatgaaccagtgttaatctttttgtttcagtaaatgtattatggttatataagatgttagcattcagggaagctggataaagagtagacaaaaattatcttgctatctttgcagcttttctgtaaagctaaaaaagaaaaaaaaagtcttaataacaaggatacaattttccagagagagagaaagatgttgtaatagatgtaaattctttcttgggagacaaagctttaacatgctccaagactaattatctgaccaatctctccccagataaagaaagattgtcactaggcaaatgtccaaaaagcttctcagccgaaagctggattattcaacagtccctgaaacaaatatacacagaggacaagtgatttttttaaaaagggaaacaagcctggcatggtggtccatgtgtgtaatcccagcactttgggaggccaagacaggaggatcgcttgaggccaggaatttgagaccaaccggggccaaaaagtgagacccagtctctccaaaaaacaaacaaacaaacaaacttagccaggagaatcgcttgaacccgggaggtggaggttgcggtgagctgagatcacgccattgcactccagcctgggaaacagagcaagactctgtctaaaaaaaattttttttaaaagaaaaaaaattagctgagtatggtggcacgtgcttgttatcccttttgcttgggaggttgagaagggaggattgcttgaacccaagaggttgtgtctacagtgagctgtgatcgtgccactgcactccagctggggcaacagagcaagaccctgtctctaaaaaaaagggggtgggtgtggggcaggggaggaaacaaataccatgtatctaaattgatcgaaatttaaagagaagtgcaacaaattattgagttagagggatacagtaagggcctctcttaggacaagcagaaggactctctaaggaggtgacagttgagcagagagaccaggaggaagtgaggacatgggccccacaaggatctggagaaagagtaatccaggtagagaagatggcacatgcaaaggccctgaggtgttttattaatttcctttgatggccataacacattaccacaaattgggtggcttgaaacaacaggaattaattctcttacacttcgggaggccagaaattcagcatggaggcatcagtggggccatacactctctcgagatctttggggaggatccttaccttctccaacttcaagaggctccaggcattctttggcttatggctgcgtcactccaatttctccgtatatcttcagatggccttattccctgtgcctgcatctccttctgtatcttttttttttttttttttgagacggagtctcactctttcgcccaggctggagtgcagtggcgcaatctcggctcgctgtaacctccacctcctaggttcaggcaattctcctgcctcagcctcctgagtagctgggattacaggcacacaccacaacacccggctaaatttttttgtatttttagtagagatggggtttcaccatattcaccagagtggtctcgaactcctgacctcaggcaatccgcctgcctcagcctcccaaagtgctgggattacaggcatgagccatcgggcccggccctcctcctctacgtcttacaaggatacttgtcattgcatttagggaccaccctcatccaggataggctcatcttgagacccctcacttaactacttctgcaaaaacacattttccaagttaggtcacatttgcacgttctgaatgtacattttagggtctgtcattcaactcattacaaatgggatgggctttgcatgtgcagagaaagtcaggaaagccaggatagctagaaggaagagagcagaggaggcagggaggagacgctatcaaaggctggacaaaggccagacaggtatgattttacagactgcatgaggactgcaaattttattctaagtgaattggaaagccagagaggattttgaacaatatgcaaccacacacaatctgcacatgattattcataggtgctttagttgcaatagctgaaaactggaaaaaataacaaaaaacaacaaaaaaaatatcccttaagagaggaatggttaaacaaactgtgattcacccataccatgaaacactgctcagcaataaagagggcaaactactaaaacacgacaggccaggtgcagtggctcacgcttgtaatcccagcactttgggaggctgaggcgggtggatcacctgaggtcaggtgttcaagaccagccagaccaacatggtgaaaccccgctctactaaaaatataaaaaactagctgggcatggtggtgggtgcctgtaatcccagctactcaggaggctgaggcaggagaatcacttgaacccgggaggcagaggttgcagtgagctgagatcgtggcattgtactccagcctgggtaataaagcgagactccatctaaaaaaaaaatatatatatatatgtatgtagtcaggcatggtggcatgcagctgtagtcccagatactggaggctgaagcaggaagatctcttgagcccaggagtttgaggctgcagtgagccatgattgtgcaactgcactccagtctgggagacagagcaagaccctctgtcttgctaaaaacataaaatacaacaaaacagaaaagcaaagaagcacgcaacactttggatgaatctcaaaataagtagcctgattgaaagaagccaatcttggccgggcgtggggctcatgcctgtaatcccagcactttggaaggcggaggcgggtggatgacctgaggtcaggagttcgagaccaccctgaccaacatggtgaaaccccgtctctacaaaaaacataaaaaattagccaggtgtcgtggtgggcgcctataatcccagctactcaggaggctggggcaggaggatcacttgaacccaggagacagagtttgcagtgagccaagattgtgccattgcactccagcctgagcaacaagagcaaaactccgtctcaaaacaaaaagaaagaagccaatttcaaaggtaccattaatatgatccatttatatgatattctccaaaagtgacaaaaccatactatgggaggaaagatcagtgttgccaggggttagggaagggtgttagaataaagggggtagcatagaaggttttgggggtgatagaactgttttgtattatggtggctgcatgtgttaaaattctaattatgatagtggttacctatgttaaaatttttattgaactgaactctaaaaatttcaattttactgcatgatcctttaaaaactaaaattacgtacatataattttatacatatatgtgtaaataaatagataattatatgcacacacacaccgtccataaataaatagaattgtttaaagacacactggcaccaaaccaaagtgatcccttgaagtaaccagaagatttgaaagagaactggaaaagggactcaatttctgcctgtgcaattcaaaggtgtctttgatgttactcgcaggaaacgctgctgttaagtgtttcaagtctggggaagcaatgcgcttaccacaccctcatatccttgtcaatgcttatttttatgagtttcgaagtaagtatagagtctggaaatgtcacagagggaagcgatcatcaatgtcaagtcctctctttgatgacttgtgagacacagagcggggtgatctctgcaagtctcagcaagtggttcagtactaaactggttcccagatttcctgactcttcccggtgggcatgaaatccctgtgtttctaaacgctcctacagccttcgagaaggctcctaaggcacttagagctccttctaaactgatgcaggcccctaatcctggctttcatctccttgagccaaggacagcatcacgtaggcttccaaccgtcgtcatgaggtgtgagtcataccggcctccacacctgtaggaggtaatgcctaacagggagtgatggaaccggtatttccatccactcaagcaaataaatgaaaaccaacaagctctcaccactggggaaaattaaccatccacagaaaccacgaaaacattactaaaggagttgtcagtaatttataaatgaacagattcccaaaatttaaaaagaaaaatggagtcatcctacacaactttcaatgtgcttaacatgccccttaaaattgaaaatgaggctgggtgctcatgcctgtaatcccaacactttggcggagccaaggtgggaggatcacttaagagtttgagaccagcctgagcaacttagaaagattccgtttctacaaaaaaattttaaaattagccaggtgtggtggtgcgcacctgtagccccagctacttgggaggctgagatgttgcttgagcccaggagtttgaggctgtggtgaactatgatcacaccactgcactccagcctgggcaacacagcaagaccttttctcaaaaaaagaaatattgaggccaggcacaggggttcacgcctgtaatcccagcactttggaaacccgaggcaggcagatcacttgaagttaggagttcgacaccagcctgaccaacatggtgaaaccctgtctctaccaaaaatacaaaaattagccaggcctggtggcacacgcctgtaatcccagcaactcaagaggctggagcaggagattcgcttaaacctgggaggcagaggttgcaatgagctgagatcacgccactgcactccagcctgggcgacagagcaagtctctgtctcgaaaaaagaaaaattgaaattgaaatccaacatcctgggatgagctgacccacagaagctttttggtaatagccaaaaactgaaaaaaccaaaatactcctcgagaagtgaatggttaaatgtcctacggcacatccattccatggaatactactcagcaatgtaataagcatttattcgatattatactttatgtattataaaaagaaaggcaattatcattggcagagaagagagtcatcctccaaaatatggacctctttagtcatgcctaatggaacatagtataagaattattattcccttaataattattatttccttcctagagagaaagttatattagctaatcataaatacacagaatctagaaattgttctaaaactttatttttctcagtggggcgcagtggctcacgcctgtaatcccagcactttaggaggctgaggcgggtggatcgcctgaggtcaggagttcgagaccagcctggccaacatagtgaaaccccgtctctactaaaaaatacaaaaaattagctgactgtggtggcgggtgcctacaatcccagctactcaggaagctgaggcagcagaatcgcttgaacctgggaggcggaggtagcaatgagctgagattgtgccattgcactccacggcaacaagagtgaaactccgtctcaaaaacaaaacaaacaaacaaaaaaacctttatttttctcttgaggctcccatcagactacctgggaaggagatcttcgctcctgtctccctttcctttcctttctcttatccctcatttcctttgggtttggttttttttttttttttttagtactaactgcaggatcttggctcccagtgaattggctaagattgtgaagagtattgacagcttggggctgaatcctagttttgcctttcagttgcatttgatattagacacatttcttttcttttcttttttacttcccatgctgcactgatgtaacttttttttttttttttttttttttagtttctaatttttgtgagtacatagtaggtgtatatatttatggggaacacaagattttttttttgtatccattaaccatccccacttccgtcccaccccccaccacccttcccagcctctggtaaccatccttctactctctatctccaagagttcaattgttttaattttagctcccacaaataagtgagaatatgccagttccatctaaattgttgcaaatgacaggatctcatttttttatggctaaatagtactccattgggtataataagtaccccaaagtccactatgtcatactttttttttttttggaggtggagtttcactcttgtcacccaggctggagtgcaatggcacgatcttggctcactacaacatctgccttctgggttcaagtaattaccctgcctcagcctcctgagtagctgggattacaggcgcccacaaccatgtctggctagtttttgtatttttagtagagacagggtttcgccatgttggccaggctcgtcttgaactcctgacctcaggcgatccacccacctcggcctcccaaagggctgggattacaggcatgagccaccacactcagcccatcgtgccctttaaaggaaatgtatatgttcctttgagcctttaagtttctcctatagcctgggataaaaatgtatggttgggctgggcgcagtggctcacacctgtaatcccagcactttgggaggccgaggtgagtggatcacttgaggccaggagttcaagatcagcctggcgaacatggagaaaccctatctctgctaaaaatacaaaaattagccagtcatggtggcgtgcgcctgtagtcccagctactcaggagactgaggcacgagaatcacttgaacctgggaggcggaggttaaagtgagctgagatcatgccactgcactccagcctgagcgacacagcaagacccttgtctcaaaaaaaagtatgattggagctaaagaagcaactttggactcagacatggaagctatgatttaaggaaagcactttaccagccctaaactacccacctccagacctgtacatgagcaagatataacttctatccaggttaaactactctattttaggttctcgttgttacagcagctcatactgtacaataatttaaaagttagcaccaagagtggggttttgccctaataagtaccagatgtggggttttgccctactaagaaccagaactggggttctgctgtagtaaaaacctgaactgtaaggcattaacttgaccatcagacagcaggtcatgaagacacagatacaaggtgaggatctggtgatctatgttacattatggcagaccactaggtaaaactgtgatgtcttgaatgacagagcaggcaccgatggagtctccaagctttggagatgtcattggaagaacccagactatttgtgtgtgtgtgtgtgtgtgtgtgtgtgtgtgtgtgtgtgtgtgtgtgttgactacttctggctactattaataaagagagagatatgtactgtagaagtggagatggaaaggaatagaattgtatcagtgaggccgggtgtggtgcctcacgcctgtaatcccagcactttgggacgccaaggtgggcggattgcctgagctcaggagttcgagaccagcctaggaaacactgtgaaacactgtctctactaaaatacaaaaaattagccaggcatggcagtgggcgcctgtagtgccagctactcaggaggctgaggcaggagaatcgcttgaacctgggaggcggaagttgcagtgagctgagatcgcgccactgcactccagcctgagcgagagagcgagactctgtctccaaaaaaaaaaaaaaaaaaaaaagaattatatcaagggaggctctttctccatgcaggctacagttgaaatgaactgacggtggtgattcagggcctcacagggcttcaaagcaaaacacctcctgcacccataaaatgaagcatccatgcaagatggctctgatgaggcaacgggttctcagcagcttcccacttggaagtctcttctagactgtgagagtcagcccaggagcaagagtactgcctcccctctcaactctgcctttcaaaaagctaagagtagctgtcactaacatgagagaatatccccgggcgcggtggctcatgcctgtaatcccagcactttgggaggccgaagcgggcggatcacgaggtcaggagatcgagaccatcctggccaacatgttgaaaccccgtctctactaaaaatacaaaaattagctgggtgtggtggcacgtgcctgtaatcctagctactcgggaggctgaggcaagagaatggcttgaacctgggtggtgaaggttgcggtgagccgagatcatgccattgcactccagcctgggcaacaaaagcgaaactccatctcaaaaaaaaaaaaaaaaaaagaaagaaagaaaataaaaaaagataagagagtaccaaggtccaggcatagaggctaggaaataaaggaggacagagttaaggtttaagaactatgccagagaagatattgataattggctctcgctccttgcatatgggcctgcctggagacaagaggatggaaagtctactaaatttttgagatctgcattgtcaaagaaactatataagtctggactgctttggcacagtcttttgactgtgattatttgacattaaaaagaaaatcttggtggggagcaatggctcatgcctgtaatcctagcactttgggaggctgaggcgggtggattacttgagatcaggagttcaagaccagcctggccgagtagtgaaaacccatctctgctaaaaatacaaaaactagcctggcgtgatggcgcatgcctataatcccagctacttgggaggctgaggcaggagaatcacttgaacccggaaggcagagattgcggtgagccacgattgtgcccctgcactccagcctgggttacagatggagactccatctcagaaaaataaaataaaataaaataaaataaaataaaaaaatcttggccaggagcaatggctcatgcctgtaatcccagcactttgggaagccaaggcaggggaatcaattgagcccaggagtttgagaactggcctaggcaaaaaagtgagacccaatctctgcaaaaaattaaaaaaattagccgagcatggggttgcatgcctgtggtcccagatacatgggaggcagaggtaggaggatcccttgagcccacaaggttgaggctgcagtgagccatattcacatcactgcagtccagcctaagtgacagagaaagaccctgtctcaaaaaaaaatctgtatcatgaaccccctcaaaattgtaccagcaagaaacgagaaaacttcagaaatggctttggggcatagaagacaatgaagggccccactagcgggcaaaaccaaggaccatggaggacaatggacaaacaacttactctctggcaaggctgcccttcaaggagtcttcacaatttctgcctgataaaatttgcatttgttttgttttgttttttacagactgggtctttctctgtcgcccaggctggagtacagtggcacgatcatagctcactgcagtctcaatctcctgggcccaagcaatcctcccatctcagccttctgagtagctgggaccacaggcacatgccaccacacccagataatgttttgtttttttgtagagatggggtctcactatgttgcccaggctggtctcaaactcgtggcctcaagcaatcctccaacctcggtttcccagagtgctgggattacaagcatgaaccactgcacacctagttaatttctgcataatgaaaatttcatattgcggttcattgacttttgtgtgtttcccacgcttccattgaagtggaggttttttattgtttgggaaattgggggcagaggtgtttgtttgtttgtttgtttgtttgtttgactatggttttaccacttatactgcatgtagactagagggagctttttaagtttgtaggccaccagaccatgagaaaccataccagagctcaatggaggaatgttatatttcaaaccagaccagcgagtggatgagtcattaggctatgtctcttggatagggatggtctgtgtatgagaagaaggaggtgcatgtacactgtatgcagtggcaccagttcatctagctctgcctgtttagggaggtgatttagatatttcagaaccaagatatctacaagacaaataaactcttctcttgccaactcaatgttgctaactggctgcatttcattgcatatctcttttaacttaatttctatttttaattgtggcaaaatacacacaacataaacactaccagtagagtcatttttaagtctacagctcaatggcattacgtacattcacactgttgtgtaaccatgaccaccactcattatcaggacttttccatcttgcaaaagtgaaactccatacccattaaacactcactctccattctcatctcccttaggccatgacagctagtgttctactttctgtctctatgaatttgaatgctctgggtacctcacagaagttgaattatctgggtacctcatagaagtagaattatacagtacttcttattttgttattggcttatctcacttagcatactatcctccaggctcatccatgttgtgtcagaatttccttcttcttaagaatgaataatattctgttgtatggtggtatgtgctataccatgttttgtttattcatccatccactgaagggcacttgtgttgcttccaacttttttggctattgtgaataatgttgctctgaatatgggtgtgcaaatatctcttcaagatcttgctttcaggctttttggattacacccagaagtagaattgctagatcatatgctgaatctatttttaactttttgaggaaccacctgtattagtctgttctcacactattaataaagatatacctgagactgggaagaaaaagagcattaattggacttacagttccaatggcttggggaggtctcagaatcacgacaggaggcaaaaggcacttcttacatggcagcggcaagagaaaatgaggaagacacaaaagtagaaacccctgataaaaccccgtttttactaaaaatacaaaaattatctaggtgtggtggcacacacctgtaatcccagctactcgggaggctgaggcaggagaatcacttgaaccaggaggtggcggttgcagtgagctgagattgcggcactgcactctagcatgagtgacagagtgagactccattaaaaaaaaaaaacccacacaggtttagaatctcaaagtgtctatagatcaggaatcttagttggggcacagctactcacaggctgcaatcaaaaggttggccagagctgcggtcttatctgaaggcacaagtgagtaaggaccctttttctagtttatttatgtggttttagcatgaattcagttacttgaaaactgttggactaagggccactgttgctcactggatgttggctgtaggctacactcagtttcttgcctctccaaataggctgttggcttcatcaaagccagcaagagagagattttgctgccaagaaggatgccaggatctttgtaacacaatcatggaaatggcatccactcaacattttgatattctattggtcagaagcaagttactcaagaggaggaaattatatgaggtcatgagtaccaggaggtgggatcactgggagccatcttagaggttccctgccatactgtctcctcttctgtattttagggctccagtgcctgaccacttgcttccccaacttctagcaacaccttctccccttctagtactagaaaggcattctcctcccatcatatccttatagtaagctttaccctctcttgccatgtgaccatgatgacagaatcatttcagcggaacgtgatttatgggaaagtggcaaggatttcaacaaacacatctgtttaggctgggtgcagtggcacacccctgtaatcccagtgctttgggaggccaaggcaggagaattacttgagcccaagagttccagatcagcctgggcaacatagtgagatgccatctcttttttaaaaaaaattatccaggtgttgtgttgtgtgcctgtagtcccaactaactacccaggaagctgaagcaggaggagtccttcaacccagaagtttgaagctgcagcaagctatgaatgcaccactgtactccagcctgggtgacagagtgagacgctgtctcttaaaaaaaaaaaaaatctgtttagaattttcaaaatagtatccttgtgagtcatataatcatgtatatgtttaaatacacagaatgagcagcagaaatggaaaacagagatgcaaggagaagcattgaaaaggcaaggcacagatgtctacatgaaaagttagagttatatgagataatgactcagtttccccagcatgatcagaagagtattgatggggagagtttcccttaggcctggcctattttattcttaggcaattctacttgtaagtgtatcaactggattcaacaggaaatggaagacacattgcttctgggtaatttaggggaagtttttcaaagggtctgtttgtaatgatgtgggcaaagttaagggctggtgtggcatcccagagctagcaacactggggagctgttaacacttattaatgcctgatggtgcaaggaagagaatgcttacagatgaccagaaaaagtggctgtgtggaagggcctatggcccctaataaagagagcagccaactacagcaaccaagcatctggtatctctatagtctccctgacatttctttccttctgacctccatctcctgacaatgcctccaattggccaaacccaaccagaaaccagagggtgccaagcccatcagtgtggtccatataggttggtctcccgagacaacaagcaaagtagacattttgggacaaatagaaaacacagcacataaagcacagcccatatcatattttcttggagaattttatggtgtcagcttcatcacctgtgttcagcaaacttcccttttcctaattccacaaagtataaaggtaggttattgatttaggatctttcttctttttcaatgtaagcattcgcagctatgaattgccctctgagccctgcttttgctgcatcctataagttttagtgtgttttgttttcattttcattcatctcaatgtactttccaatctaacataatttcttctttgacctcctggttaagagcatgttgcttaatgtctgcatacttgtaaagttttcttctgtcactgatttcttactttattccattgtagtcaaagatactttggattatttcaatccaacaccagcatctaattaaacaaaagttaattactaaagcacagtgagacaccactttacatctattaggattgatatgatttttaaaaacacaaaataggccaggcacggtggttcacgcctataatcccagcactttgggaggccaagatggccagatcatgaggtcaggagttcgagatgatcctggccaacacagtgaaaccccgtctctactaaaaatacaaaaattagccgggcatggtggcacgtgcctgtagtcttgctactcaggaggctgaggcaggagaatcatttgaggtggaccctgcagtgagccaagattgcaccactgcactccagcctgggcaacaaagcgacactctgtctcaaagaaaaaaaacattaaaaaaaacctacttcttagtgtgacaaaataaaagaatgctgaggacggtgtcagtccagatcaatgctactagacacaaccttccacagcccaccctcaaggggctgccttaatggcatcctccactggtgcacatcagacactgcagaccaccgtgcatcgcagccaagtccaggaaatgaagacgaaagaaaaagcatccattcctgagcttatgccaagtctcaggcactattagttgacaaagcctatctcatttaaggcatgggagtgaaccctgtttaccagatgggacaactgagtctgtggaggtacacatgctaataaaaaccctagagtggctgggctcagtggctcacatctgtaatcccagcatttagggaagccaagacaggaggcttacttggggccaagagtctgagatcagcctgggcaacagagtgagaccctatctgtacaaaatcagaattttaaaaattaattgggcacggtggtgaacacctgtagtcccagccatgtgggaggctgaggagggaggatcacttaagcccaggagttggaggctgcagtcagtcatcattgcaccactgcactccagccttggcaacagagcaagaccctgtctccgaaaggaaaaaaaaaaacaaaaaactaaaatagcctgaaacgtagagcaggtttttgtttgtttgtttgtttctgttttgttttgagatggagtttcgctcttgtctcccaggctggagtgcaatggggtgatctcggctcactgcaacctccacctcctgagttcaagcaattctcctgcctcagcctccgcagtagctggaattgcaggcctgcatcatcacgcccggctaatttttgtatttttatcagagacggtgtttcaccacatttgccaggttggtctccaactcctgacctcaggtaatctgcccgccttggcctcccaaagtgctgggattacaggtgtgagccaccgtgcccagccaagcagattcttatttaaaaaccccacggctccacgccagggtcctcctcagagccactctcacctccttgttccacagagtgcacaccacagggttcagcagtggcatcaccaccgtgtagaacacagccaccaagcggtcctggtcggggttggccccggactccggacgcaagtagatgatggaggcgcagtcaaaatgtactacgaccacggtgacgtgggccacacaggtggagaaggccttgcgccggccggctgccaaggaaatcctcacgatggcagccacgatgaaggcataggagaagaggatcgggacgaaggacatcagcaccaccaggacgctcaggaaaaagatgcccagcgccttgctggcactcttggcgcagctgagcttcagcaccggggcgatgtcacagaagaagtgctccacgtggtctccgccgcaaaagggcgatgagaagatcatgctggtctcgatcaaggccaccgagaacccagagcagaaaaccagggctcccaggcagaggcaaacggtgggtctcatgaccatagagtagcgcagggggtggcagatggccacatagcggtcataacccatcagggtaaggaggaagcagtggctgcatcccagacccaggaagaaaaacatctgagcctgacagccagggatggagatggcctggtctccatcagcagatgagccagcatgctggggatggtgaccagcgtgtatagcaggtctccgagagggacagcaccaccaggaagtggtacatgggagtgtggcgggacctatccgcatgggtgatggtgatgatggtgacgttgccaccgagggtgaccaggtaggtaaggaagaacagggtgaagagtgtgttcctcaggtgtgggaggttggagaatcccatcatcaggaattctgtcaccagacaggtcccattttcctgctgcttgtaaagagacagagaggaggcaacagaataggtaaaatagagtgattaataagggtctgcgatgcatcaggtagcagtgtggaaagaaaatcatttctggccaggcacggtggcacacgcctgtaatcccagcactttgggaggccaaggcgggtggatcacccgaggtcaggagttcgagaccagcctggccaacatggcggaaccccgtctctactaaaaatacaaaaaatgtagctgggcgtattggtatgcatctgtaatcccagctacttgggaggttgaggcgggagaatcactcgaacccaggaggcggaggttgtagtgagctgagatcacgccactgcactccagcctgggggactgagtgaaactccatctcagaaaaataataataataattcctgttttgcaaaaactgaaaggggtactcagaaacaataagccctttgttttcctaagagtcacacaactagcaagtgactcttccacagataagaaaatcagaggaatgtatgagaaaatgatatttggtgtgtggaaggaagatggtaagtttgaatttctctagaaacagatgcttgataagaattcaagagaaatattttatataaaagatgatttcaagtgacatacatagggaagtaggacgtgaaacaaggaaggtagataaccaatacaatgtacatcaccaaggaaggtactgccgtgggccactggaatttaatcttatgtgcagaaccgtgggacgtgtccaggaatatacacttctatgtttttttacccaaggtatgagggagcttggggatatatccactcagtcccattagccactgattgaagatttctctcaggaggcattaaagtgccagcacatgccgcttgccatgtgtacagaaaattcaaagtctggctcagcaagaaaaataggagcaacggggatgtaggtgagaattttacagggtctgctatagtccatgtgaaaaagaatatctggccagacacagtggctcacgcttgtaatcccaacactttgggaagccaaggcaggtggatcacttgaggccagaagttcgagaccagcccaaccaacatggtaaaaccctgtctctactaaaaatacaaaaattagccaggtgtggttgtgtgcacctgtaatcccagctactcagcaggcggaggcaagagtattgcttaaacccaggaggtggaggttgcagtgagccaggatcatgccactacactccagcttggacgacaaagcaagactctgtctcaaaaaaaccaaaaaccttaggaaggcaaaggcaaagactgcaaaattgatacctgaaataaaccaaataacactttcaggagaatgaggtcagcaagattgtggaatagaagttttctgcctttacttccttcagctactggaaattgctggcaactgttcaaagtgaagaatgctatcattaatatcaagaccttaggagtgaggctgagatgcccccttggactgaagaataaaaaaaaaaaattcatggtgaaacagtaagaggaatggttctctctgactacactgtccctccctgaggccagcaggacaccatatgctgagagttctcctggacccatggtttttgcagtggaagggatgagttggaagtgaacattcagcttctccatcattctgggattcttcacgggtagcttgctcctatctcgtcccacttgaaatgttgagaatgccggcatggctggacaccaggggtcagttcggtcaaagaacagcggacgaggggctcacaggaaccagttcacaagttttggtacttgcgctgcatccccaccagcagaagtgccgatatggttaggatatttgtccccacccaaatctcatgttgaattataatccctaatgttggaggtggggcttagtgggaggtgtttgggtcatggaggcagattcctcatggcttggtgctgtcctcacaatagtgagtgagttcttgcaagatctggtcatttaaaagtgtggagctattccaccccactctctctctcttgctcctgcttttgttatgggaattgcctgctcccattttgcctttcatcatgagtaatgcttcctgaggcctcctcagaagcaaagcagatgacaccatgaagcatgctggcaccatgcttcctgtacagcctgcagcactcttagccaattaaacctcttttcctcatgaattactcagtctcaggtatttctttatagcaatgccaagaatggcttgctacacttgccacaccatagaaactagcaaacagcatcatgtgcaagaaacatggtgcatgttatttttcctaacaacattaccacccagccagggaaaacaacatccaaccatgcctgatcagagacaattgcagagcccagccagccgccccacatgatggcagagtccagccaggtgcccttaccagactgtggaacacattcagaaataccactcaacctcagagaacaggaagcaactcagcccagttagagaaccccacagcaaagtctgcctgtctggagtttcaaccagccagcccacccagaattccaaactaaactaaataataaaggtctatcacaaccaaattccacctgcaaaggctggaaaggatggctgtctcctcaaatgtaaaagcaactacgtaggacacaggtttatgttttaaaaaacaaacaaaaaaataaaaaaacaaggaaacataacactactagaaaaaaataataaagctccagtaacagacccagaagaaaaggtaatctataaaatgactgaaaatgaattcacaatgattctctaaaagttcaggagcctaaaagaaaatacagatagaaaattaaatgaaatttgaaaaaactttataaacaaaattagaagtttggcaaagaagtagaaacaattaaaagcacaaatagaaatcctaggaagaaaaaaacataataacctaaataaaaagtttgatacaaagtaggattaagagtgtagagatactttatttctgtgatcaaagttaagtggttatcatcttaaaataatcttttaacactataagatgtattttgcaagcctcatggcaagcacaaagcaaaggcctataatagatacacaacaatgaaaaggaaggagtcagtgttcgctttggcagcacatatactagaaatggaatgatacagggatgatcgtggcccctgcacaaagatgacatgcgcattcttgaagcatcccaacataaaacttattttaaaaggaataaatcaaaacatatcactagaagaaagcatttaagcactaagaaaaaaaagtaaatgaggaagaaacaaaaagaatacataaaataactagaaaataatcagcaaaatggcaatagtaagtcctcacctgtcaacaattaccttgaatggacacgaattacattctccatcaaaaaacatggggtgaaggaatagatagaaagaggcacccaatcatgtgctgcctaaaagagacttaattcacctgtaagaaacacagaatgaaagagatggcatggaaaaagatattctagggctgggcatggtggcttacacctgtaatccaatgctttgggaggccaaggtgagcagatcacttgaggtaggcattcgagaccagcctggccaacatggtggaaccccacctctactaaaagtacaaaaattagccagacgtggtggtgtgtgcctgtaatcccagctactaaggaggctgaggcaggagaatcacttgaacccagaggcggaggttgcagtgagttgagatcgcgccaccgcactccagcctgggcaacaaagcaagactccatctcaaaaaaaaaaaaagaaaaagaaaagaaagaaaaatataatccactcaaagggaagccaaaaaaagagcagggattacaatccttatgtcaggaaaagaaaataaactttaaataaaaaactataaagaaacaaagaaaaacattatataatgataaaggaatcaattcagtacaggatacaacaattttaaatatatatgcaaccaacaatggaaaacataaatgtataaaacacatattccctgagggattcatgccatgaaaaagtacaaggccttacttcaaatcttcagaaactgaagtaaaatgaaaccccaagccaagaaactcagactctacttaagaaatccagatctaggcccggcacgatggctcatgcctgtaaccccagcactttggaaggccaagcaggcagatcacaaggtcaggagtttgaggccagcctggccaatatggtgaaaccccatctctactaaaaatagccgggtgtggtggcacacgcctgtagttccagctactcgggaagctgagacagaagaattacttgaacccaggaggcaaaggttgcagtgagctgagatcaagccattgcacttcagcctgggcaacagagcaagactccatctcaaaagaaaagaaaagaaaatccagatctaataaaaagcatactggcagacatgccctaaatatgtctgaaacaggcctttttatggtgaagtaaacaacatcaaagggaagaacagaaccctttatagagaccgtgatagaaactcaataacatggaagacttcacagtgaaaaaataatgagatatgactatttaagaagtataattacttaacatgacaaaacattgttaaattgaaacaaatttataggcaaatcacgaactagaacaaagctgtgataaatgtttacctcttacaaattaagaaaaatgtgagccaggcacagtgactcatgcctgcaatcccaacacttttgagaggccaagacaggcagatctcttgagcccaagagtttgagaccagcctgagcaacatggtgaaacttcatctctacaaaaaaaaaaaaaaaaaaaaaaaaaatatatatatatatatatgtatatatgtatatatatattagccagccataatagcatgtgcttgtagtcccagctactctggaggctgagaagggaggatcacttgagaccaggagatcaaaactacagtaagccatgattgcaccactgcactccagcctaggtgaacagagagcgaccctgagaaagaaagaagaaagaaaaagagagaaaggaaggaaggaaggaaggaaagatgggagggagggagggaaagaaaggaagaaagggaaagaaaggaagaaagagaaagaaaggaagaaaaagaaaggaagaaagagacagaaagaaagaaagacaaaggaaggaagggaagggaagggaaaatgtataggaccactccccaacattcatggagctcaaataaagacccatataccatgtgactgattatttaaagttaaaagtgaagctaataaacagttaagtaaaatatgctctaactcatcacactgacagccttcataatgacatgaaaaaacagaattcaatttaggatttctggactctttagagttccactccagaatgtgatgctgtggagagcaccgtgtgctagtttctagcccatgtcctatccccttctcttcccaccccaggtgccacttagcactgcgaggggccttgtatgtatgtgtacagatatcccaaccatgcaccttcaagatgcagcaacaccctccttaactacaccactgcttaaccacacctaaggaaatacacgccagcagtgtggttcatatcagaagaaagaagtcctacttttggccctgctagtggcttggagccacctgggcagggaattctagggtcatgtagcgcatcatctacaatgaggtgcaagctcaaggtaaagacatactcttgactttgtaaactcttcaccccttgggatggggtagagtcgagtcctcagatgcatcagtgccagggcagaatccctcttgcccaaggctaacagtagtcctctaacaccccagtataaaatcagcagatgaccctgatttcattatgatataatgtatacatggattgaaacatcaaactgtactccataaatacatagaattattatgtgtctgtctagataatttcacctctagatttttctcattgaaaaataactgcacttagatatataggaatgttcataactgcattatttaaatttttaaagaggacatgacctaaagtgttctatagtcgaaatgcccttacaaacaagggtaaaacaaaatactgacattctaattgaaaaagatacaaagcacaaaaataataagacattattaaagtcgtatctttgagaatggataataacatgggaagaattctcatatatgggttgtgtgagagtgggatacgaaacagtaaaaattctgtgatgacattcgcatacattctttatacttttttgaatttcccaaatattctacatcaattgctaatttgtatcaatagaaaaataacatttcttagaggatattttttctcttgataaacccttttcctgtttaatcaatctagtttgacagaggaagccaagggttgagataaacaatgcaaaacatgctaaagccatttgtaactaaagtgttttgttttgttttgtttgaaatcgagtctcactctgtcgcccaggctggactggagtgcagtggcacaatctcacctcactgaaacctctgcctcccggattcaaatgattctcctgcctcagcctcccgagtaggtaggattacaggcatctacctgccatcaagcctggctgtcatttgtaattaaagttttaagaaataatctgaagagcaagtgactgtggaagagaccctttaaggtattatcacaggctcccttcaggtataagtcagcaccctcttgggcatcacatggaagggaattggaaaggaaaccccccttgatatttgctcagtgtaggagtgtcctctaccacaattatcctgcctccacttgcttgcctccagtgatgagaagatcactagctgcaaaaaaatgcccattacctagagcagaaatttcatgctcaaggacagcccctcagtgaccagcagcaataccaagtagagctctgtaatatcacaagcctagatttgaatgctggtgccttaccaggaacagggtgaccttggtcagctaattttgctcctctgagcttcatctatgaaagtggagattgatcttctgaagtcacgggtaataggaagatgccctgacagtgttaggaatcttttggtctctaactacatttttttttttttttagactgagtctcgctctgtcacccaggctggagttcagtggtgcagtctcagctcactgcaacctctgcctctgggttcaagcaattctcctgcctcagcctcccaagtaactgggattacaggcatccaccatcacgcccggctaagttttcgtatttttagtacagacggggtttcaccatgttggccatgggccaggctggtctcgaactcctgacctcaggtgatctgcctgccttggcctccaaaagtgctgggattacagacatgagccaccacactcagccggtctctaacttcttatgaggacgcctgggattcttattctctgctctgcactgcttgagaggcagagtatagcaggtttaatttgctcacattctcagtcctggcatcaggattggaacccaggagtctgtctctggaggctgtgctttcaggagtgtgagtttcagcgactcacctttcattacacacatcttcatgaacagctcctctgtgacaggtgcttctgagggcatgaggacacagcagggaactaaatgggcagagatacctgccctggaggagcagaaggtactaagggaggcagccgcgcaatcagccacaaacaggataactcaacaagtgagttacatcagagctaagtgctagaaacagaaaagaggacctaaagggagaattgagaaatcaggggagagttgccattgttaatgggatggtcagaaaagtccttgttgatgtttaatcacggtcagctcagaatttctccttcctcgactgccccaattttctgatctcagctctaggctagagatggatcagcgtggcttctccagccaggcaaagaccccgaattcacaattgaaaaagaatgagggaatgagtcaagacggaggagagcattccaatttctccttccttgactgccccaattttctgatctcagctctaggctagagatggatcagcgtggcttctccagccaggcaaagaccccaaattcacaattgaaaaagaatgagggaatgagtcaagacggaggagagcattccaggtagaggcaacaccctgtggctgcaccatgcctggtacaggagcagcaaggaggaatagtgagggagagacagtgagggagagggagcaggtaagcacagggaggggacagagggatgttgtgtaggccttgtagatcaaggggaggacttggcatttactcctaatgaggtgggactatggaggggtctaagcagaagagggacatccccaggctcaggtgttcccagacgccctctggtggctatgggaaaactgtgcgtgaggcattggacacagcaggttaagaggtgactaggctggtccaggccgatgataatgggatcagtgtggaccacgtgggccattggaagtgggcttgccatggtgggcacatggaggtggtgaggacttgcccatctggatgggttgtgaaggtgaagcccaatgaattttttgatgggttagaagtgagtttagagacaggccgggcatggtgactcatgcctgtaatcccagcactttgggaggccaaggcaggcagatcacttgagatcaggtgttcaagaccagcctggccaacatggtgaaaccctgtctctactaaaaatacaaaaattagctgggtgtggtggcacatgcctgtaatcccagctacttgggaggctaaggcaggagaatcgcttcaacccgggaggcggaggttgcggtgagctgagattatggcactacactccaacctgggcaagagagtgagactccatctcaaaaaaattaaataaataaacaaataagtcaggtgcagtggtgtgctcctgtggtccccgctactttggaggctgaggtggaagaactgcttgagcctaggaggttgaggctgcagtgagctgtgatcatgccactacactccagcctgggcaacacagcgagatcttgtctcaaaagaaaaaaaaaaaaccttaaccatttccattcattcatgtattcattgaacaaatatttaaatatttttaattaaaaattttttttggctgggcatagtgactcacgcctgtaatcccagcactttgggaagccaaggtgggtggatcacctgaggtcaggagttcaagaccagcctgtccatcatagtggaacctcgtctctaccaaaaatacaaaaattagccgggtgtggtggcacacacctgtaatcccagctacttgggaggctgaagcaggagaatcacttgaacccaggaggcggagtttgtagtgagctgagatcgcaccattgcactccagcctgggcaacaagcgtgagactctgtctcaaaaaaaaaaaaaatttattgttttaaaaacagaaataggctcaaagaaagagctggtggaggagctggcagagtcacactgggggataggggcagggccagcccagctggagttcagcgaggactctgtccatctcaggattgctgggggtggggacccacagtgtctagagctctcaaaccgacaacctggcccctctccgctctcatcttggaggtggcgtctgccccaaccccctgcacccaccccagacagaaggaagaagaaaggaggaaatcccaaatgtggctgaacattaactctgcaacagctgaggagctgtgactgagtttgctgcaatgtgtccagattccaggcctgacccaaaaagaggtcaattcacaggagtagaatattccttatttgcctacctggaacccatgaaaattgcacccattgagagcgcccaggctggttgcttgcttagtgagagagttacagggaaccagttggtgctgagttcaaggaccaagccaatgccacctccacagtgcaggggagaggggaccaggtgacactcctgagagctgtctggagccgggaagctgaggaatgcatgggactggggtctggagtctttccttttcctctttcttctcatcaggaagacccccaaaggcccttctccgcccctttcagccccaccctaaatgactctgtgtgtgtgtgtgtgcgcgcgcactcatgagactctagggcacatgcgtgtccacaccccatatcttccctgtctgcttgcacacctgttcacaccatgatgcagtgtctgcatgtgtgtgacttttcaagggtctcttttggttcccccagatgcgcctccttgcctttctgggaaaatcttatattcttctccagcccatgctttgtagttggcaaaaaacagatcgaacacctttctgggaaactccattcaagtgtgtcactgcttagccttttctgggttagcatagtccctctacagtttctctctctccccacttatttgtagatctgaaccttaaggccagggatgggccggggtggctccttcagccaggaaaagcctctgaattcacactcaccattgccaagggaggctcctgcagtgcctgctggcatcgctctgttcaccacctaaaaagggaggggctgaggacacagctcctgttatgctgagggtccccagagctgccatcccacaggccccctgaacactaagaagtcccacggagctcaggcaggtggcaccctgaggggattttccctccaggaaactcaagacccctgggtcagcttcctaagcccacagaccctgcatgcacagagcgggaaaaggactaattactatttctttttgtggataacaagcagaaattcattaatgaatggcagagcattcattcatgctcctagtacccacctgcgctaggcaaggctgcttcctgaggaaatgcacccccaggccctgccctcaagagagggaggaaggagtggatcatttgatgttgttctaccaatgttgcccaggtttaacatctcttggtgacctcagccttctccatccctccttccctagaccattaattaccaaatcagcattcttcctcccaaaattctctctatcccctcacctccaccccaactcaggactgcattattcttacctgttgcaagaacctgcagtgtcaactccctccagtctgacctctgcactgaccccaggacagaaaactcaagctgtgctcctcctctacgcaagcaccttccatggctccccattgctttcaaagtttaaaatccctccatcttcacatccaagactgttgtgatatgacccctgccacctcctctactactaaatacagccattgctccactcataacaacactcactcctacttttactaaaaacacaccaccagcatcaccttctccaggaagccttctgtaagaacccccaagctagtcatatgcagtatctgggctaccagaagtcctgggttgtctcttcatattgtctgtgttcctctgtgtctcctgttagcctgtgagctgtcggacctggcctcatcttattcctttctccaggagcattaaacttagatgataaatctgttccttgcaatgctcctttctctttcttttcatggtatatgctttttctctggccactcttccttagtctcctcctcttctgacccctaatatgataattccccagggctcagtcctagaccttcttatctctccctagctgatgaatatagactcatgattctgtgtacccaatctatgccaaaaagcctgcatagtttgggtttcccccagacacagactctgagacaaggattccagtggaagtaagtttatttgggaggtgataccagatctgaagaagtgaaagtaggaacaaaaggaagtttataaagcatgtcctatcaagtaacttatccctgtaagcaactggggtcaatcccactggagacctctgggtggcagcatagaacattcactgcagaggggtaagggagctgaggtatgtatacacccactccagttggttattgttgagggttgctcctgagtgcattaattatccaatactcctgtcctgctgtacatgtggatggagtaagctttaatgtccagagaaagccctcagacaaatagatgcaagcaccgagtgttggaaatcaggccaatatgcagtgaagttgtcagagaaagtggatgcgggcaggggactgacaccatctgctgcatgtggtttgtccacttcatttctgaccattctttgtcactctctttctttacttttactgttctgatattgaagtagctcacggcttcaaccttgactctcttctctctaactgattagtacaatcatatggttttaaataccacttccttaccagtattccccaaatctacatcttagatcagccaaccactctgagctccagatgcataatccaacaatcaatcatcaaccaatgtgaggtggaatgtcagaaaaaatgtcagagtaaggacctccataaattatgtcctccataaagaatgaaaaagctagaaaaaattgttagactaaatttttgggaattctagaaattaactaaagtcttgcagcaactcagagaaaatgtattcagaaaattactgaatatcagtgagaacagcatactcggcattttaacatctctggtcttctcccccactctccagctccgtggtcgtcttgaaaaataccagcccaaactctggtgcagcctggcatccaccagagagagcaaaacagaactagagcactttcaagcctcattcccaaagaattgtcattattttttaaattttatttatttatttatttatttattgagatggagtctctctctctctgtcgcccaggctggagtgcggtggtgcaatctcagctcactgcaacctccgcctcccaggttcaagcaattctcctgcctcagcctcccaagtagctggaattacaggcatgcaccaccacgcctggctaatttttgtatttttagtagagacagcgttttaccatgttggccaagctggtctcaaactcccgacctcaaatgatctgcccacctcggcctcccgaagtgctgggattacaggtgtgagccaccacacccggccaagaattgtcattatttaccaagctaatggttccctgcaagatcccactggcaaagctctctgtatttgacctggctctgagataaaccatgcaaaaagccttcactctgggggtcctttgttgacaacagctacaggaaggtattttagcttcatggatgcctgaggcagtgagtgacagttgagacaaatagactaaaccaaaagctagggaaggagctgtctatagaggctttgaaaggctcagataaggctgggtgcagtggcttatgcctgtaatcccggcacattggcaggccaaggagggtggatcacgaggtcagtagttcaagaccagcctgccaacatggtgaccctgtctctacttaaaaatacaaaaattaggccaggctcagtggctcatgcctgtaatcccagcactttgggaggctaaggcaggcagatcacctgaggtcgggagttcgagaccaggctgaccaacatgaagaaaccccatctctactaaaaatacaaaaattagccaggcgtagtggtgcatgcctgtaatcccagctactcaggaggttaaggcaggagaattgcttgaacccaggaagcggaggttgcagtgagccaagatcacgccattgcattccagcctgggcaacaagagtgaaactccatctcaaaaaaaaaaaaaaaaaaaaagagaagaggccgggcacagtggctcacgcctgtaatcccagcactttgggaggccaaggcgggcggatcacgaggtcaggagatcgagaccatcctggctaacatggtgaaaccccatctctactaaaaatacaaaaaattagccaggcgcggtggtggacgcctgtagtcccagccacttgggaggctgaggcaggagaatggcatgaacccgggaggcagagtttgcagtgagccgagatctcgccactccactccagcctgggaaatagagcaaaactccgtctcaaaaaaaaaagaagaagaaagattggtagatggatggagagaaagatatataaatgatagatgatagaaaaatagaaagattcatagatataaatagacaacagaggacagagaagcataagatagatatagacggatgaaagataaacgatagatgatagacatagatagataataaataaatgattgacattctagacagatgaggcatgcgcagaatgtaggcaaggaatgttactataccttggggctcacaatggtggagagcctttatcgcttctatgccaaaagggccaagcagaggaaacaataacccagacccacagagggtaggtagctggagggagagcactgcaggtaccctgcaggcagggagccagggagacaaatacattccaccctctaatccctcacctgtgtctctcattggccaaacccaagtggaagccagagagtaaggaaacccattgatgccatctacctgggtcattctcccagagcacagagaagagttgaggaagatcagtgcagatctggaggcaaaaagcagacactcagctgttttatcattgtcctttcagtcaaaaaaccaactaggatgtcaattccaaagtccccaacccttcccaacttcagcatgccaatgaaatcacatacatatgaatccttgaatctcattagttaattttcctccatcaccagtgcaggcttcctagtcctcaacctaacatcctttctgcaatcattccagggagctcccagtgtgggtgagtctcacatgtgcttacaaataagtcagctccaccaggtacgaaagtgggttcccgctgtgggacactcttcttcaatattctgttgacatgaagccaaggttgcatgatagagtggacaaaatgggtagggagaaggactttctcctcatttgtacagcacttgggaagaagaatacccaaacttgcttaagccccagtagatattttattttttattcccaagaatctactcatgcataaagctaagatggacttctcttgggccaatgattcaagtgcaaggaatttattcgcaagatcattccagaaagctctagtaggagtgaggaagagtaggttgctgctgtgggcaactggggcttaatcccaaagagcatcctttgggagactctgtggatcatatccatgaattcccacagagagtggcgaggaagctggggtatttatccaccatctctcattcatccctcatatgttgagggttgctcctgccccacacaagagaaagttcccaggtggagagtctcaggtgttcagtcagatgctgtcagcaagcactagaatggtaagttccaagggtatacaggggtgcaccccccatacatccctcaactagcctgaaattccataaaagcagagactgggcctatataattcaccattctattctcaacaacttgtccgggagttggcacacggtaggtgcccaatacaggttagagggtaagggaataaacataaaataaagttgagacaaacctaaaagagactgtttcatcttcaaagacttagcctaaagggggtgggagaggagtaaacatttattagaagcttccacagaattcatgcttctgcaaacctgattgcccctaaatttagcacatcagtagttccaaagaagagactttaagacatgctttaagacaacaacaggtgtgaatctgcctcccagatgacaattggcaatgtctggagacatgttatattggttgtcacaactggaaaaggggtgctgctggtagctaatgggtagggaccagagatgctattaaatatcctacaatgcacaggacagctccccacagcaaagaatgatttggccccaaatgtcaataatgccgaaattaagaaaccttaggttagagggtggatacgtgaaccaattggagtcaatagaaaaatcaaccacaaggtcgagtgcgatgactcatgcctgtaatcccagcactttgggaggccaaggtggatggatcacctgaggtccggagttcgagaccagcctggccaacatggtgaaatcctgtctctactgaaaatacaaaaattagccaggcatggaggtggacacctgtaatcccagctacttgggagactgaggcaggagaattgcttgaacccggaggcgggggatgcagtgagccgagattgtgccattgcactccagcctgggtgacaagaacaagactctatcttaaaaaaaaaaaaaaaaaaaggaagaaagtaaaagaaaaatcaatcacaatactaggagtttctctcttccctggaaggagcaatatggcacctattttgataacacagagagaaggctggagctgtgtgatgtcgggaagagaggttctactgggtgccatgtggagcatgtagatgaaactgatgcccagagaaagctgtagagatgaagagaaactgagccattgttgaccacatttgagccactagatcaattctcccctgaagtaggtccttttaatttatatgagctaataaacccctttcttgtttaagccagtagacttttgtgtcatttgcaaccaggagcactccaactgacagaatcaacgaacattaaatcctatcctcctttcctgaagacaccagtgtaaacagaaccttgtcttggagcacgactggttgcgagtaacagaaacccaccgaagctggcacaagtaaagaagtatttattacatgggtccaaggttatctccaaaacccataggagcatgaagtaaaagtgaaattcatgcagaaccatgatcagatacttagaaagcaattaataaatacctgttgatctcaatggaatgaacactcaattaactggaattgataactgcactgggagccgagataacccccccagccctcaaggagccatttgagctctcatttctgattctccctgaatattagcttcattcttctgccctgtttgcttgtctctttgcccaccacctcgaattggccactgatatttctaaatctgattgtgaccttaagagctccaccaactgacaactttcttagcctctccattaaagaaagttctcgagcaaaagaatctgattggctcagcttaagtcaggtgacaaccactaatccaatcggtagtcatctgccaaaagaggaagcataagtagactggcaagtcaaatgtatttaccccaagatgggagctcaagttagccctgggtgggggagatagaagtcccactgccaccactccccaccttacctagacacagaccaacaacactgagtgttaactattcctttattaggtggtgaggggagtggggggctgtacaatgcagggcttgggaattcagctacacagggattttgaccagaagccatattacaaaaatagcctaaaaatacctctattctgccatgaggctgggccagaggattaccaggaagagaaagtaccactcaggcagctcctcttcttgtagtcccacatttacagggacacaaaggaatgcatacatctgccctggctcccatttcccaccagcagccccctagttcccaaagggagatggccaagggtggggctggggcagagggagttggcagtgggcccttccccagcaaggctatggaacatgtcccatctggaatgcagtgaagtgagggaggtggggtggggaggaggctcccaacactcccccgacccctggccccagtgggtgcgcccaagggtgcctacttggtacatacctgggtcgtgtactcggtacacgggatcccagtcatgcctgtgtactaggtacacagaatccagcttggccgaatgggcccacagactcagccccacgggggcactggggggttcacagggggagggagcatctccatatatatattttgtaaaaaataataataataagtttgtttaaatgaatttgtttctatacaaaatgtaaaaaaaaaaagaaaaataaaaataataataattcattcatgtcagagtgtaaggaaatgagaggccagaaggagagagaaaggaatgagggaagagagaagtggggaagaaggaggtcccagactcttcacaagactgagagggtgggtggtagcccccacccattataaataaaggaagactgaagccctgggctgatgacctatctcggtcacgctgcaaggcaaggatgcaggagggttggtggaaagagaagaggatgaaaaagactaaaaggaaggaagagacagagaaagaaaggaggcaggacgggggtctctttaggcccccaagatctaagaactgacgagcgtctcaggccaacacttgcctcttgggggtaacttccggctggggccccagctgggtctgggcctgagcaagggagctgggaacagacaagggaagtggctgggcaggcagtgccccagtggtggtggccatggccccagtggcagtggctgggctaggcgtggattcggaccagtctgagagggagggaggtgaggggctggcccagtgctcaggggattcgggggatggggtcaggtaagggtgctcactgggaacccgcaggaagcgggcctttggggggctgctgtgtgccccagccgccgggtactcctcgccatgtcctgggactgccaggtaaggcgggggccgctcctgcggggagacgggggtccctgggttgagcagctggggtcccggcgccagtggcagcaggaacgaggggcctggaggggcaggtgggggcagccgggcccaatcgaggggcacagccacagggttcagcaggcccaggctgagtacacatcctccagggggctggcgccctagacccgcccggcctgggccaccaagctgtgccagagacactgcagtggcagtggcagctgcatagggcccctcaagggggaagccaccaggggaagcagggggcccaccgaaaggccgcggggagtccagcgagtccacgggcgacagcgtgaccgagctgtcagccagggggcccgggcaggccagcgtcagcttcttgccccgcccccggggcccctgcggccccagccccgccttcccggggggcctcctgctcttcttggaccccgactgtgccgctttgaggccagggaggaaggcccctggaggacagagcagaggccccaggccgtggggaccgggggggctgcggggcccactgggttgatccagcaagcgcacgatgtcctggtgcagtctctcctgggctacgtcccgcggcagcctgtccaggtggtcggtgatctcacggttggcaaagtggtccaacagcagcttggcagcctcatagctgccctcgcgggcggccaggaataggggggtctcctcctggggggccagaacccacagaggtcagcgaaaccccagctaacagtagcaaagtcttccagcctcttgggggagcccgagagctatgagtttgtacactggagcttgacagacctgggttaaatcccggctgtgctgggggagcctggacaagttctttcctctaaaccacattcatccatcacctactaagtgccagaggtcaaggccaggactagggtgagttaagcgaggtactcaccttaggcataactttttttttcttgtctttttttttttttttttttgacagagtctcactgtgtcgcccaggctggagtgcagtggcgccatttcagttcactgcaacctcagccttccgggttcaagcgattctcctgcctcagcctcccgagcagctgggactacaggtgtgcaccactacgcccagctaatttttgtatttttaatagagacagggttttactacgttggccaggctggtctcaaactcctgaactcaagtaatccacccatctcgacctcccaaagtgctgggattataggcatgaaccaccacacccagccattaggcacaaaatttaaggggcccccaaaaactttagtcaccaaagtaaattatattttaatccaatgtttggggttttattttgttttgttttttgagagagtctcactctgttgcccaggctggattgcaatggcactgtgccactgctgacacccagtggaccaagggctggggctcaccttgctatcctgcatgtccttattggctccatttttgagcagggccaaagtggcttccacgttgttcacagccgcagcccagtgtaaggctgatttccctggaggatgaaggggagagaggtcaggaccaggcacctgtcctggggcccccatgtcagggaggcagaaattgtctagaatgtggcctaggggtagaggaggcaggcctgccgtgaatatccaagtacttgtgtctggatccatgtgtgtgcaaatctgcaaaatgactctgtgcaatggggaagcactttgtgtctgtgtgtgtgtgtttgtgtgtgtgtgtgtgtgtgcgtgcatgtgcatgactgtttatacacagggggtgctgtgtggacctccttcagttgaacctagggttgtgacatccaatacagtagtcagtcacatgtggtttttatttatccatttatttatttttgaggtagtgtcttgttctgtcacccaggctggagtccattggcacaatctcagttcactgcaacctctacctgctgggctcaggcgattttcctgcctcagcctccctagtagctgggactacaggcatgtaccaccatgcccagctgattttttgtatttttgatagagatagagttccactatgttgcccaaactggtctcaaactcctaagctcaagtgatccaccagccttggcctcccaaagtgttgggattacaggcatgagccaccgtgcccaacctacatgtggttctttagatttaaatttaataaaataggtgccaggaccattcaatggggaaagaatggtcttctcaactaatggtgctggaacaactgaatattcacattcaaagaatgaagttggacccctacctcacactttatacaaacactaactcaaaatggatcagaaacctaaatatatgagctccaactatagaactaaacatctagaagaaaacataagagtaaatcttcatgaccttgaattaggccaagattcttagatgtgacaccaaaaccacaaataacaataacaactacaaaacagataaattggacatgatcaaaattgaaacttttggccaggcacagtggctcacgcctataatctcaacaatttgggaggccaaggtgggagtattgcttaaggccaggagtttgagatcagcctgggcaacaaagtgagaccccatttccacaaaaaatttaagaattacccaggtatgctggcacacacctgtaataccagctattcaggagggtgggatgggaggatcacttgagcctgggagtttgaggctgcagagagccgtaatcatgccactgcactccagcctgagtgacagagtgataccctatgtctaaaaataaaagaaaaaaaaagtggtccatcgacacaatggattattattcagctgaactatgctacaacatgggtgaaccttgagaacataatgctaactgaaaaaaaggcagacaaaaaagaccacgtatcatatgattacatttatatgaaatgtccagaacaggcaaatccatgaagacaaaaagcaaatcagtggttgcacagggctggacagatgaggggcttggcagatgatggccaagtggtgagaatttatttttcaggtgatgaaatgttctaaaattgattgtggtaatagttgtatgactctgattatactaagagccattgaattgtacactttaaatgggtgaattgtatggcatgttaattatatctcaataaagcagttttttgttttttgttttttgtttttaaaaaaaaggatggactcagtggctcatgcctataaccccagcactttgggaggccaaggcaggtggatcacctgaggtcaggagtttgaggccagcctggccaacattgcgaaaccccgtctctactaaaaatacaaaaaaatagccaggcatggtgatgggcacctttagtcccagacacttgggaggctgagacaggagaatcactggaacctgggtagtggaggttgcagtgagccaagatcacaccattgcactccagcctgggtgacaagagtgagactctgtctcaaaaaaaaaaattaaaaaaagggcaacataaggagaaaaaaattaaatgaactaaaacatttacttcttcatttgcctcagtcacatttcaagtcactatatgtggccagtggctactatactggacagtgcagagaataattccatcatcacagaaagtcctattggccagccctgccctagaactgtggctctcaactaggagaaactccctgcccccagcccccagagcatttggcaacgtctggagactgttttttttttttgagatggagtctgtcccccaggctggagtgcaggggcacaatcacggctcacagactcaacctcctgggctcaaacgaccctcccacctcagtttctggagtagctagggccacaggtatgcaccaccgcacatggctaatctttcaaaaaacttttgtagaacccactatgttgcccagtctggtctcaaactcctggcctcaagtcatcctcctgcctcagcctcccaaagtgttgggatcacaggcatgagccaccacacatggcctgatgtgtacgtttattataataacttccagcaggtggaagtacagtgtgtccgtctaacaaagcaggtggaaatgaagtatctaggggaaaggcacctttttctaaatccctgaggcaccctaaggactagtggtgaccctgcatgaccctgcaggcttcatgaagcctggttatgtgtgcgtgagcttcagtgattgggtctcaacatgggtatgaatttgcaccaacatgaccctcagggcccaggtgacaccaacccagcttagacttgattcctctgccaacctaccaagctcatccacagcattgacatcagcatggctggcgatgagctcttccaccatgccctctactgccaggcgggccgccaggatcagtgccgttgagccatctgccatgcgggcatccaagtctgtagagcggtttcggatgagaatctaggacagagagtggatgcagcaggaggggtcatggcaggaacagaggaatcaggagcacccctaagtcccatgaagtccccaacccccataccccaacccctgaaattggtgaggttcagggagcagctgcttgacagatactgtattcccatatatccccattttccaaatgagaaaaaatgagtctgaaaggcagaactggggctcaaacccaggtaagtctaatgcctgccccagctctgaggtccaaagtgtgtgcctatctcacctggaagacaccctgggcatcggctgtgacagctgtgtgcaggggagtgcggcctgagtggtcctgggcattggtgtctgccccagcatccagcagccgcttggctgcatcagcacgggcataacgggcagccaggtgcaaagcagtctcgccagtacggtcagtccgtgccccaagctgagccccctggcagatcaggtcggagatgatgctagctgatgtgtcatctgcctcatcctcttcagttggcattggctccagagcccccccacagaaggaagccagcattagcggggtgaagccatctgcagggacaggagtgtgtcagcaggaaggtaaacacagggccttttccaggaaatgttatcaagggtaccccattaggagctaatgggacacatggaaaaatgacaattagcagatcctcctgtctgcacacccacacccagaatgaggattcgtgggcacgtgatttgtcacagaactactcctagggcacagggaacacaggacaagggactctgggagtcaagcaagtgtgcaacctccagtaaattcccaaagggttattccaccttgatcctccaaagggactctggaacatgtgttgtaccccagagttctaatccaactcaaggcaaagaaaccatccccttcatactcctgcacccactggttaggagctgcccctttctgccaattcatttgagtgttttaaaagggggggggaaaaaaagagctgcccccagggacataaaatcccaggcacttcaggccccagcagccagagggacttcaaaagagagccataagtacaggccatttggagcataagcaaaatgaagctaaggcaggaatgccctgaaacataacaaagatggatctaagaggatcaaacaacatagtccgctacactgcacacactgtacacaagcacttgtcctcatttttcttagggagccacttgcatccggttctccattctcaagccctgggtagagactgacctccccgctccaccagcagacccgacccccaccagctcaaagacaggtatgtgaatcaggcttggtcaatttgcatattccagccccctggtcatactgattggctcaaggatgagcacgtgaccctagtctgtccaatcagaatgcatcctgagacttttctggagcattaagaaggttttgtaagattggagtcaaagggtagagaggggaaaactgagtcctggatccaaatgtgccacttttagttaaatgagttgataaatcccttgttttacttaagctagtctgagttggacctttgtcacttccaaccaagagtgttgctgaatacacacacccttcacagaagcttagagactcccccagttctccccaaaacacagagtcagaaataacctctcacaggtaggatgggtgaggggcatccctttgggaggggcactgtcactaacctgggccacgcacattgacatccatgccatcagcatctgcgtcgccctgtggtggtgtcagtgccatggctggtgccacgcggatgtcagcagcaaccagatggtgttgagtccactgacggcaatccacagcctcctcagcccccatgcctggctcctctacctggaggggcaggcaccctggatctcagatctcaccctttggtgctggggagagccactgccagggatggggctgggcattcctacaggtttctctttaggagatacacacagagccctgggaaatcatttaccatctgtttggtgttttatttgtttttgagacagagtctcgctctgtcccccaggctggagtgcagtggcatgatctcagctcactgcaacccccgcctcccgggttcaagtgattctcctgcctcagcctctggagtagctgggattacaggcacatgccacggtgtccagctaattttttgtatttttagtagagaaggggtttcaccatgttggccaggctggtctcgaactcctgacctcaggtgatcagcccctctcagcctcccaaagtgctgagattaacaggaaatcaatgtgtgccatagcccaaggaggtaataaaaggaagacacaaggtttctttttttttttttttttggtctttttgagtaataaatggctttaattatttatgtatatattttttagagactgagtctcactgtgtcactcaggctggagtgcagtgctgcaatcatacctcactgcagcctcaacttcctgggctcaaatgatcctcccacctcagcggcccaagtagctgggactataagcacacagtataagcagattgggatagcatctgatccaggttcaagttccaaccccaccccttagtagctggaaggctctgggcaaatcactttgaagctctgagcttctcattggcaaaatcaggatgacgcagccattccaccatgctaagataccaccacaattacattgggccacccctttaatacctctaatacctactttgggatgggaaggcagaaggaaaagtctgggttgagcaggtttttttatctgtccactgtaatagatgattccatttcacaacattaaaatatggacagaggaagggagtttgtaaattgaagtatatgtcaatagctactttacagcgtcctcagagagatgaaataagatgttttatgtgcattagagacattcagcgggtgcctcagtaatgctagcaggatctgtatggactcaattgtgccccctctaaaaatcatacaatggccgggcacggtggctcacgtctgtaatcccagcactttgggatgccgaggcgggtggatcacttgaggtctgcagcttgagaccagcctggccaacatggtgaaaccccatctctactaaaaatacaaaaattagccgggcatggtagcacatgcctataatcccagctactcgggaggctgaggcaggggaatcacttgaacctgggaggtggaggctgcaatgagccaagatcacgccactgcactccagcttgggcaacagagtgagacctggtctcaaaaaataaataaataaataaacagaaatcatacactaaaaccctaaataatatataaaatttccatgtgcctgcatttgaagataggactttatttttagacagggtcttgctctgttacccaggctggagtgaagtgatgcagtcatagctcactgcaggctccaactcctggactcaagtgatcctcctgcctcagcctcccaagtagctgaaattactggtgcaagctaccaagcctggtgagatagggcctttaaggaggtaattaaggttatatgaggttataaatgtgggaccctaatccaataggattggtatccttacaagaagaggatgggatgtcaaatctgtctctctctctctctctctctctctctctctctctctctctctcccctctgtgtacacagaggaaaggccatgtgaggctacagtgagaaggcggccatctgcacaccaggaagagagcccttaccaggaaccagccctgacagcaccttgggcttggacttccaacctccagaaccgtgaaaaaattaatttctgttgtttaggtcacccatgctgtgggacttttttttttttttgagacggagtttcgctcttgttgcccagtctggagtgccaggttcaagggattctcctgcctcagcctcccaagtagctgggattacaggtgcccgccaccatgcccagctaatcttttgtatttttagtacagacggggtttcaccatgttggtcaggctggtctcgaactcctgacctcaggtgatccacctctgtgggattttttaatggcagccaaagctgactcatactgaacccaggggcatgactccatgagctcagaaccggctcagagcactttcaggctaagtccatgctggacaaaataggaactgacagagataaggcagactcgctctctgggctggggggacacctccaggaagagtgcaggctggccaggaagcaggatcctggctggggaggggcaggatggaggggaggattttccacctgcccggagggacccttggggccccagtggcaaatcttcctccctctgaggtcacagaaccacactgagaagaaagggttgcaaagctgggactattctctggagctagggaggtggggacagcggtgccatcccctgatcacgcccatcatccactggggaccccacccagtaccctgaggggaggggtcagaggagggggcaaaggtcagagggggggcagtacctttagccgcttggcctctgggcactctgtgtccatccagtctgtggccacctcccccatcaggctctcacccttggccatgttcctggcggacaatgggaagaggggatgtgagggggacactagaggtgtccagctgggaaggaggatttggggtggggtcagaggtctgagtcaggtcaaggcggggtccagggttcacaaggtccccgtagtcagggacagggagcgagcagggttctcacttcatgcccagcgcgtcctggcccacgggttcccgccggcccttgtgaccagaggccacgtccttgtgcagtgagaagccctcagggaaccagagggtgctgtgctcgcgcttgcgccgggccaccatgacacccaggacgagaatgaccagcagcaagacagcgcccgccactagcagtggcagcagcgggacgctgggttctggaggctccagcggctcccctaagagcaggaagcagagggcggggcttcagccgagggcggggctttggcctcaggcggggcttcggccgcccccagctccgcccccgccaccccctccccaaggcagggccgcaccccgcacgtcccgcagtgggtacgggaagtccaggcgctccaccgctgacaacgctcccaggtagtcagcggcgctctgggcatcggggaagcagtgatcattctcaggcgactgcaggcagagccggttgtcaatctccagcattactaccgagctgcagggacagcagggagggaccagagggctcaaaaattgcccgatgcaccccctggtaccaagccccactttccctccccagcgcctggctctgaagcgccatctccacccacaggtctccatggcccacctgcatccacctggcatccaaccccactgcacccctaaaacgtgtcttgctgtggtcagcagtccccccagagccatgaatccaatggatattattttttgatcttgcaccgaggctggagtgcagtggtgcgatctcggctcactgcaacttcccctcctgggttcaagcgattctcctgcctcagcctcccaagtagctgggattacaggcgtgtgccaccatgcccagctaatttttttgtatttttagtagagacggggtttcaccacgttggccaggctggtcttgaactcctgacctcaagtgatcctccctgccttggcctcccaaagtgctgggattacaggcgtgagccgccactgtgcctggcctgttttttttgttgtttgtttgttctgttttgttttttgagacggtttcactctgtcgcccaggctagagcacagtggcgaaatcagagctcactgtagccttgacctcccgccttcaagcaatctttccacctcattctcccaaagatctgggaccacagacatgtgccaccacacctggctaatttttggggggggttgggggtggaggcatagagattaggtgtcactatgttgcccaggctagtcttgaactccggggctcaagcaatcctcccacctcagcctcccaatgtgctgggtttacaggcctgggccactacgcccagccaagggacattgtttgttttttgtttttgagatgaagtcttgctctgtcgacaggctggagtgcagtggtgcaatctcagctcactgcaacctccgactccctggttcaagtgattctctgcctcagcctcctgagtagctgggattacaggcacgcgctgccacgcccaggtaatttttgtatttttagtagagacggggtttcaccgtgttggccaggacattgtatttgtttgtttgtttgcttgttttgagacagagtttcactcttgttgcccaggctggagtgcaatggtgctatctcagctcgccacaacctccacgtccagggttcaggcaattctcctgcctcagcctcctgagtagctgggattacaggcatgcgccaccacgccccagtaattttgtatttttagtatacacagggtttctccatgttggtcaggctggtcttgaactcccgacctcaggtgatccacccgcctcaacctcccaaagtgctgggatcacagttgtgagccatcacacctggcctcttcctcttttttgagctaattccattcatccaatccttaggtctccgtgtccccagattaattcttctgttccttctctccccactcctttgagtccctctcatggcttcaatgatcatcaacacttttatatctttcttgtttgtgtctttagcccccaggtatctccttggaggccttcccaatacttccaggtccctcagactctgcaagctccaaaatgacctgtttttcactttgtggccctatcactcagcttagccaggggctggtacaccaaccactctccttcatccctctacccctccccttccaccacccacatcccaatatctgcaaaacccaaccctcctctctgtatcagagacccacccctctcaggtctctgccttctcctcaacaatagctacacctcccttctggtacctctaccaggccactagcaggatacttctatattttttctttttctttttttttttttttgagacagagtctggctctgttgccccggctggagtgcagtagcacaatcttggctcactgcaaccttcacttcctgagttcaagtgattctcatgcctcagcctcctgagtagctgggactaaaggcatacaccaccacgcctggctaattttttgtatttttagtagagacagggttttgccatgttgcccaggctggtctcaaactcctgacgtcaaatgaactgccttccaaagtgctgggattacaggcgtgagccaccgagcccctcctatttctttcttcttcttcctcttcctcctcctcctccccctccccctcttccttcttcttcctcttcctccccctccccctccccctccctcctccctcttcttcttcttcttcttcttcttcttcttcttcttcttcttcttcttcttttttttttttttttttttttttaagagatcggaggccgggcatggtggctcacgcctgtaatcccagcactttgggaggccgaggcaggtggatcacgaagtcaggagatccagaccatcctggctaacacactgaaaccccgtctcttactaaaaatacaaaaaattagccaggcatggtggcggccgcctgtagtcccagctactcgggaggctgaggcaggagaatggcatgaacccgggaggcggagcttgcagaaagccgagatcgcgcctctgcactctagcctgggcgacagagcgagactccgtctcaaaaaaaaaaaaaaaaaaaaagagagagagagatgggagtcttgctatgttgcccaggctagatttgaattcctgggctcaagtgatcctccaagtagctgggactacaagaatatattgtgcccggctttatcttctatgtctttaagaagaagaaaattagcccggtgtggtggtggatgcctgtaatcccagctactctggaggctgaggcagagaattgcttgaacccaggaggcagaggttgcagtgagctgagatcacgccactgcactccagcctgggcgacagagactccgtctcaaaaaaaaaaaaaaaaagaaaagaagaaggagaaggagaaggagaaggagaaggagaaggagaagaagaagaagaagaagaaaaaaaccctacacatgtatttaaccactctgccaagccacttagcaacctgcctccccacaagccagcactagacctgggcaattctaccccagaagcactagctccatctggaggcattttttgcttgtcacagccaggaggcggtgctcctgacatctggtgggtaaaggcattaagtgaaatgaaacacacaagacctggatcaacagcatctctcctctccccagccaccacggcttttccaggtggggtcactcacccgatcacctcgggggccagctcccgacgggcccggggttcggagccaggactaggccggtggtaagggaagaccatggcctggccgtgcgcgtccaggcggaagcgcagcgaggtgcgcaggatggcgctgagccgctgcagaaagtcggcgctggaacgcagtagctcctctggcggcagcagcactgtgagcaccagcacgccgcgggccagcagggccggcacctcgctggcacaatccagcccatcccagccgcactcctccgtgttgcagccctggtcgcagcggccgtcggcaaagtggtcggcgcagtacttctcgtacaccgggctggtggggaagggtgaggcagagaggggcggagtcaggggtcagaggagacaatccccttccatgcattcacaccgtagagtacagagactccagacaaggcttgcacaggggactggaatatacggacccatgccaggctttctgcaaatcttgccattcactggataattttttttttttttttttgagacggagtcttgctctgtcgcccaggccggaatgcagtagcatgatctctcagctcactgcagcctccacctccccggttccagcgattctcccgcctcagcctcccaagtagctgggattacaggcatgcaccaccacgcccgtctaatttttgtatttttagcagagacggggttttactatgttggccaggctgctgttgaactcctgacctcaggtgatccacctgcctcggcctcccaaagtgctgggatcacaggcataagtcaccgcacgcagcccttgataatatttttttaaattgattgattgaaatggggtcttgctctgttgcccacgccggagtgcagtggtgcaatcatagctctctgcaatctcaaactcctggactcaaattatcctccctcttcagcctcccaagtagctaggactacaaacccacaccacactcccggcctcactggctaactattaattaatcagtaaatactaactgactaccatgtgttgggcactgctgcaggcacaaggataaggcccggccacaattcctggtccacgtgcagctggcattccactgggtgaagacagatagtaagggagatacatgagccaaatatacagcatctccattactcatcaataaaataaaaatacaggctgggtgcggtggctcatgcctctaattccagcactttgggaggccaaggtgtacggataacctgaggtcaggagttctaggccagcctggccaaaatggtgaaacccccgtctctactaaaaatacaaaaattagtcaggcatggtggcgggcgcctgtaatcccagctactcgggaagctgaggcaggagaatagcttgaacccaggaggtggaggttgcagtgagccaagatcacaccactgcactccagcctgggcaatgggagagaaatcctgtctaaaaaaaaaaaaaaaaaaaatacatatatatatatatatatgtatatatatgtatatacacacacacacacacacacacacgcacgcacacacatagtgctggatggaattaaatgctaagcagaaaaataaagcagaggaagggctgggggtgaccagggaggtgctcactgagaaggtaccaccatttcagcaaagacttgaaggaggtgagggaggagccatgtgggggaagggaacagccaggcagtaggaacagcttgtgcaaaggccctgatatgggatcaagcctggggtatctgggaaacagcagagaggccagggtggctggaacagagtgagtgaggggaaagcagagaagatgaggatgtggagattaagggggtggagggttccaagcagacagagaggtacgcagaggacagaaggggcagggtgtagggatggacagatggactgcctaggacagacagagagaggggcagaagaggggcagagatagtcaggggcacccacagatagccatatagaggagcaaaaagagtgcatggatggacagattcggcccaaggatggacaaacaggagtggaggaagacagttgggtacacagaggaacaaaagcaatttttttttttttttttttttttggtgagacagagatttactcttgctgcccaggctggagtgcaatggcacgatctcagctcacctcatcctccacctcccaggttcaagcaattctcctgcctcagcctcctgagtagctgggattacagccatgtgccaccacacccggctaattttgtatttttagtagagacggagtttcaccatgttgcccaagctcaaactcctgacctcaggtgatctgccctcctctgcctcccaaagtactgggattacaggcgtgagcactgtgcccggccaataaaaggaatttttaggctagatgtggtggctcaggcccacaatcccagcactttgagaggctaagctgggtggattgctttgagctcaggtgttcaagactagcctggacaacatggcgaaaccccatctctaagaaaaagcacaaaagttacccgggcgcggtggctcacacctgtggtcccagctcctagggaggctgaggtgtgagggttacttgagcccaggaggtagagattgcactgagccaagatcacaccactgcactccagcctgggccacagagcaagaccctgtcttaaaaaaaaaaaaaaaaaaaaaaaaaaggagccaggtgcggtggctcacacctgtaatcccagcactttgggaggccaaggcgggcggatcacaaggtcaggagttcgtgagcagcctggccaatatggtgaaaccctgtctctactaaaaatacaaaaaaaaagccaggcgtggtggcaggtacctgtagtcccagctactcggaaggctgaggcaggagaatcgcttgaacccgggaggcggaggttgcagtgagccaagatggagccattgcactccagtctgggcaagagagcgagactccgtcttaaaaaaaaaaaaaaaaaaaaaaaggaattcggctgggcacggtggctcacacctgtaatcccagctactccagaggctgaggcaggagtactgcttaaacccgggaggcagaggttgcagtgagccgagatcgcgccactgcactctagcctgggccacagagcaagactccatctcgggaaaaaaaaaaaaaagtaattattggatggagaaaagggcagacaaacggggcagagaagtgcataggcagatagaaacaagaacaagatagacagagcacatggatgaacagacacacggacagacacgtgggacacaccgatgggcagatagagtgcacagagaaacagacggggcaagtggatgggcaggtggaaagagaggcagggcccacggacaaacagactgggatggatgcatagacagacggatcgatcgggtggatgggctcacttgcaagtgcgctcgcggccaccggcgtggcagtcgaagttgtcgtagaggcaggcgggcgagctgcaggcggggtcgcagcggctgttgttgaagaggcgccagcactgcagcgcctcgcattgccgccaggggtcgcccacgctcagcgagcagtcgccgccgtcccagccgcagcctgggctgttgcactcgcggtcgcagcgctggtccccgcgcttggcctggcaggcggcgcgcgggcaccgcggctcctccgagacctcgggtgccgcggcgggcgcctcgcagcgcggcccggtccagccctgcgcgcaagcgcagcggaagaagggcgcgagcggcgcggggcggcaggagcccccgtggagacagggggcggccgcgcagctggcgttgctggcccccggcggcgaccccgggaagctgcggcaggagggtcccgacaaccctggggggcaggcgcagcgcggcccgcggggcgtctgctggcatgggacgcccaccgggcactgcagctcccggcaggagcgcgccacccgctcgcaacgcggaccccagaacggctgggggtcgggtttggggagggagggataaaaatgagggtggggagtggagggaaggaggagaagaaatggaggagtggggaaaagaagagtcaaggggagagagggggaagagaagaggtcaagactaaggaaggttgagaccccctcaacctccccatgtcccacccaaccgctcccctttccacactggagaccccacctggcagataagccctgccatcccaggaggccacgccccccaatcaccatcctcacccttttcccttcaaacctccaggaaatgtcggggcagggggttgtttctttgttttttgagacggagtgtcactcagtcgccaggctggagtgcaatggcgtgatggctcactgcaacctccgcctcccgggttcaagtgattctcctgcctcagcctcccgagtagctgggattacaggcagctgccactacgcccggctaatttttatatttttagtagagacggggtttcaccatgttgcccaggctggtctctaactcctggcctcaagtgatcctcccgcctcggcctcccaatgtgctgggattacaggtgtgagctaccacacccggcggaaatgtcagcattttccagaaactcccttcccttcgatgtctcccctaaagccacatcctcctcctagacgccacgcccctactactccagaggccacgcccctactcctcctccaaaggccgccacccacacctacctgggcacagtgacaggtgaaggtcagcccacccccaggacccgggctaggacggcactggcctccatgctggcatggctgggactcgcagggagacaggacagtctgacagcgaggacctgagcgagcgggagcatgtagatcagccacaatgggggaatgacaggcggggtcccaggccagccccttcgccaacgcttacctgagaagccagcatgacaaaggcaacggaaacctccgcctgggtcctgcaggcagtcccgggtgtgtgccgcgtggcaggcacctgagcgacactcattgatgtctgcctcgcagcgcaaaccagtgtatcctgggggacaggtgcagcggaaaccacccaccaggtccacgcaggtgccattgtgtaggcaccggggccctgagtccagcggtgggcctgggccgcagtcatcctcattaatctcgcagagcacccctgggggaagaaacgaggggtggtcaagagggaatgaagacagcctctcatcctgtccccccaaccctggccctggcatacccagcgttcctgggggacaggagcagagatagcgggccacgaggtcaatgcatgaacccccgtgctggcagggctgggaggcacactcgtccacgtcgtcctcacagttatcaccattgtagccaggaagacacttcagtggggtaagagagggacccactcagcttagtgggacacagacccacctggacatacccatgaagacgcaaagaaccccagcacaaaaggacacacacagatgttcagcgcactaccagtaggtaatcccagcactttgggaggccgaggtgggcagatcacctgagatcaggagttcgagaccagcctggccaacatggtgaaaccctgtcactatgaaaaatacaaaaattagctgggcgtggtggtgggtgcctgtactcccagctataatgagaggctgaagcagaagaatcacctgaacccaggaggcaaaggttgcagtgagctgagatcgcgccactgcactcgtctgggtgacagagtgagaacctgtctcaaaaaaacaaacaaataaaaaaacaccccagatctacccagagtgacacccacagatacaccaagagtcacaaaagcaaaaactcagacatatctagagacatacccataccaagccacacagaaatgtgtgcccagacgcacccaagcatgcccacctcctcttccctctcctggggagcgcccccttacctcacacatgtagccccccatatagccacggcaggtccccccatgctggcagggctgggccaagcaggggtccacctcctgctcacagtggctaccagtacggccctctgggcacacgcagtagtgggagctgtcttcatccacacactgcccacccgcctgacacagctgctccagccgcacccctgcaaagaggagagtggcacaggaacagaggtaaccccatacatcccccttctgcctccatcacacagatcattcaacatccttggtggaatgagtccccaggatcgcacccacactccatcaggttgtcacacatccccccagcaggcaaggtctcatcactgacatacacacacatgccttcaacgctcacagcagctcggtcacaccctgtagcacacacaccatccctgctgtctcacagtgacagacacacaccatcccggccagttgtcacatgctcacacacccacaccactcagccacacaccccatcatgccccataggctctgtggcacccccattcggctcacactagcaggaggtacgtgcatgagccccttcccaaggccccacacgcccgcccacatgctcccactcaccgatctgggctgcggcctccctgcagggcaagcttcggatgtcacagaggcgtccgctccatccagggggacaaaggcaataggccccagtctggacgcagcgacccccgttttgacaaggctggcggctgcaccaatccaccagcgtctggaggggaagcactcagagtcagtactgtggggtggggggtagtctgggagaaactgtgccccgacttggcttctccctcctaggatcccaggcaggctcctcccccaggtccccagtaactccacccacctggcactgcgggcccgtgaagctctcgaggcaggtgcagcggaagccagggtgggcggcgctgcagacgcccccgtgtaggcagggccgcgagaggcaggggtctgcctcatgttggcagtgggctcctgtgtagccgggacggcacaggcagctgaacgagttcacgccgtccacacaggtcccgccattgaagcaggagctggagcggaaggagtgggagggaggatcaggctccgccccctcacaggccctgccctccttcctgagtcccgctgttagcgctggggacgtcccactccctgacccttatctcggcaagaagctgcagccccagcagaagccaatcaggtcccttagctccaattcaccagggacttcagccctaaggtgagagccacctggaagccatgccctctcaggcaccagagactccaaggtgagctccaaacagacgccctgctccttccctggccctgccccatcagtcatcagagtccgcagtgggtaccaagctgaggactcccccaagtcgttgctgtccccacttcgtcccaggtcccaggccccatcccaagccagagtccctgctctccaagcagaggccccgcccacctggggctgcagtcgggcaggtcctgttcgcagtggaagcctccgtagcctggcgggcaggtgcaggtgaaggaggccacgtggtcggtacaggtgcccgggccgcaggggttgctcaggcactcatccacatcgcgggcgcatcgtgggccggcgaaaccagggaggcaggagcaggaaaaggagcccacgccgtcttggcacgagccaccgttcaggcatgggtctgcggacaggaggaaggcggtctggtcacctaccttgcccccattagcccagtctgactgggatatgccttggattgagaagaattcaggaggaaaccaggttcaactgggatggggtgcatttggtcagaggaatctaaatccatccccttctgtggcctcgtcccctcctttatctggaaacctcacctatgtggcaagggcaggatgttgggaaaaccaaaaggtccctttaagctgccaagcaaacgctgctaattgtgcctgatctaattcctgtgcttggaacaggacaaggacagtggccattagccacatgtggctactgagtccttgaaattgtgactaaatggagatgtgctataaatgtaaaatacatactgggtttcagattttgaagacttggtatgaaaaaaaaaataggctgggcgtggtggcacacacttgtaatcccagcactttgggaggccgaggtgggcagatcacttgagctcaggagttcgagaccaacctgggcaacatggcaagaccccatttctataaaaaatacaaaaattagctgggcatgatggtgcacacctgtagtcccagctagtggggaggctgagacgggaggatcacttgagcctgggaggtcaaggctgcagtgagtcatgatcgcaccactgcactccagtctgggcgacagagtgagaacttgtctcaaaaaaaaaaaaggaaacaatgtaaaatatctcattaacaattttatactggttacatgttgaaatgatatgttaatatattgggttaaatagattatatacatttatttatttatttatttatttacttttatttttatttttattttttttgagatggggtttcgctcttgttgcccaggctggagtgcaatggcacgatctcagctcaccacaacctccgcctcccgggttcaagtgattctcctacctcagcctcctgagtagctgagattacaggcatgtgccaccacgcccagctaattttgtgtttttagtagagacggggcttctccatgttggtcaggctggtctcaaacttctgacctcaggtgatccacctgcctcagcctcccaaagtgctgggattaccggtgtgagccactgcgcccagccgattatatacattcaataaattaaatttaaatatattaaatttggtcaggcacagtggcagcagtctgagagtccaaggcaggaggatggcttgaggccaggagtttgagaccagcctagacaacgcagtgagaccccatctctacagaattaaaataaaaatattagctaggcatgtagtgagtgcctgtaatcctagctactcaggaggttaagacaggaggaatgcctcagcccaggagttcgagactgcactgagccaagatcgcaccactgcactccagcctgggcgacagagcctcactctgaatacataataaataaataaatataaaatattaaatttaatatctcccatttctgtttattttttaatgtggctactagaaaatttaaaattgcatatgtggcttgtgttatttatctgtttggcagcacccctttttgtttgtttgtttgtttgtttgttcgtttttgagacggagttatgccttgttgcccaggctgcagtacaatgacacaatctcagctcaccgtaatctccacctccaaggttcaagtgattctcctgcctcagcctcccaagtagctgggattacaggcatgcgccaccatgccctgctaattttgtatttttagtagagatggggtttctccatgttggccaggctggtctcaaactcctgacctcaggtgatccgcccaccttggcctcccaaagtgctgagattacaggtgtgagccacctcgcccggcctctggggggccttttatctcatactttgcacatgatattaactcgattgctctcaaagacagtgcacttaggtcgggtgtggttgctcacgcctgtaatcccagcactttgggaggtggagacaggtagattgcttgagcccaggaattggagaccaccgtgggcaacatggcgaaactccgtctctacaaaaaacacaaaatattagctgggcgctgtggtgtgcgcctatagtcgcagccactggggaggctgaggtgcttgagcccagaaggcagaggttgcagtgagcgatgattgcaacactgcactccagcgacagagctaagactctgtctcaaaaaaaaaaaaaaaaaaaaaaaaaaaagaggcagcacacagactccaaggttctaagcccagctcattccctaactcgttccatgggcttgcacaagaagtcactcaacctcctcgggcctcagtttccatataaataaaacgggaaaagtaagataactgtgaagatgaaatgacagcacagtgccaggcacacagttcaagcttaatgactgtgttccccagagcagcacccccaagagctcccctgcactcactggggtcacagtcattgatgtcctgatcgcaggaagggccagtgtaccctccatggcaggtgcagctgaaactccctgccaggttggtgcagataccatgagggccacagggtgcggggccagcacactcgtccacatcctgctggcatcgtgggcctgggggtagggagcaaggttacacctagggttacagggtacagagcagggtctcagggacctggggctcaggaagaacctgcaggccgagatgggtgaaggcaaaataagccgtgctgtcattcgtgtctgggcattttgcatatgcagtttcagaatggccgtctccctgtctcagtaggtggcaaatacctactatgaggtctgctcctccaggaagctgtaccctaaaccccgccctaagtcccagcatctctagccccataactcttcctcttccaagggctgacccacacaggctgcatatcagtgtccagctctgtccttccaagaaggaagcccctctcaaaggcagggctggggatgggtccctctctggatccccagcatcatccctgatagggtagggggcagaggagatggagaggaggagggaagagaagcaggtggcataccttgccagccctgggggcaggagcagacaggcagctggccaggggcagactcgcagcggcccccatgctcacaggggttcggggtgcagggggagaggagttcacactgacgtcctgttgggggtggaagagagggaagcagagatagccttgagggactccctgatcccatctccccccacctcccccaaccccagggtccccaccttgatacccacctcccaagctcctggagggaaatgattgaaagcaaaaaagaagctaacatagcgggaggagagagtagaggagaagagagatgagaaggcccatggtgttggtggggctgcagagggaaggtgaggtacacaccctggacaccaggcgggcaggtgcagtggaaacccattccatcgctgctgcatgtcccaccggccctgcacggctgggactcacaggcgtctcgggccaggctctggctgcagcgggggccactccagccaggctcacacacacagcggaacctggcaggggaaggtagtcaggccagggaggtgggccagggagagggggcagtgtctgaggctgagaagggccctcacccgccaggtgcatcatagcagatgccgtgactgcagggctcatgggcacagggatggctcggggggaggcagagtgggggcaaggagccaggcgggcagaggcagcggaagccattttccccatccacacaggaacctccctcgccgcatgggctggaagcacactcattgatctccacgttacaaaggggccctggggagtacacaagcaatctcatctcagaacaaagtcagcagggacaaccagggagggacgacgtgaccccacttagcacacccacacccccgagcaatgacctctttttcataacgcatcagctcttgtgcagattaggacacccgcctcctcaaccaagagctgacttgccccagatcattctggtccccaaacttccatgaagtccctttctttttcttttcttcttcttcttattttttgagatggggtctcactctgtcgcccgggctggactgcagtggcatgatcatagctcaccacagcctccacttcctgggctcaagcgattctcccacctcagcctcccgagtggctgggactacagttgcgcaccaccacgtctggctaattgtgtgtgcatgtgtgtgcgtgtttatctacgtattgactaatctggctttgggagtgtgtttattttttgtagagacagggtttcattatgttgcccaggctagtctcgaactcctgggctcaagtgatcctcatgtctcagcctcccaaagtgctgggggattacagacatgagccaacacacctagcaaagtcacattcatttccactaaggattagtttagacccattcagaaataacctagtcactgagtttggacactttcatctatgttccagaataatctttttgtttgtttttgtatgtgtgtgtgtgtgtgtgtgtgtgtgtgtgtgtgtgtgtgtttgaaatgaagtctcactctgtcgcccagactggagtacagtggcacaatcttggctcactgccgcctccgcctcctgaggtcaagcaattctcctgcctcagcctcccgagtagctaggactacaggcgcccaccaccacacccgactaatttttgtatttttagtagagatggggcttcgcaacgttggccacgctggtctcgaactcctgacctcaagtgatccacttgccttggcctcccagagcgctgggattacaggcgtgagccaccgcgcccagcctgcagaataatctcgaaacaaccttatgccaatgagacagcacagactcagggcaaagcacggacaacctcgttggacaagagtctgcaaagatacgggcaaaacaggcccacagagacgagtgacttcaccctcgatctaaggaccccctctcatggcagccacttgcccacctgtgaagccaggttggcagacacagtcgtagcggttgatgccatcacggcagactccaaaggtgcaggggttgctggcacagtcgtcaatgttcacttcgcagttcacacctaggggccaggaacatggcatggagtggccaccactgtgccccactagatgcaccattcccaaaccctctgtgcccctccaggtgtgctgtttctgccccagcccccggtcccacctgtggtcccagaagggcagcggcagaggtacttgtccaccaggtctaggcatttgccgccatggcggcagggctggctgcggcattcgtccacctggctctcgcagcgtgtgcccgtgtagccaggagcacaggcacatgagaagctggcgatgccatccacgcagcgaccatggtggcatgggtcaggggagcagtcgtccacgttgcgatcacacagcgtgccctcaaagcctgtggggccaagagggtcaggctccgcccacttgccaggggcctgcccacaagtgaggcctcggaccaatcctggttcagctctatctgaggccctgcccatcaagctgtcaggaggcgagctcaatacaggccccaccccccaccccccacttacttccactccaccccactacaagctccagaatttgtccctagccaagactctcccacagttaaatcccgcccccagctgtggccccacctccagccctgtttctgccccaccctccactggagatgggagcacatggcaggtgccaggggaaggtattgggccctccccattcagttacaggcaccctgtgcccagcccaacactttggctccacacgtagccttatgtcagtctatatgcattattggctccaccccccaactctgtcactgggtcctgccttgctacaaccccgcccccaagctctccccaagtctgttattggccctgtcgcccacaagccccgcctcctgattcttgtcggactgtcattggcccgcctcaccctcggcacagcggcactcgtagccatcgggctggtccacgcatttggcgccattcctgcagggcgtgctggcgcattcgtccacgtccagctgacacgtggagccgctgaagcctggggtggggagtgggatgagcagaggcccagaaagggtgagagcagtacacccctctccagccccgccttgtttgggtggaaaaacccatttacttggatttaaattaacttcaatgtttcataacatatggtttctattgtaagttatccgctaacgtggttttacaggttcccaccctggagtttttgccccttcccagacatgtcttttcgggctccctctcctgaggtcctcacccgaggggcaggtgcagctgaagccattgactcggtccttgcagaccccaccgttgacacaggggctactctgacactcgtcaatgtccacctcgcaataggttcctgtgaagcctggggcagggaatagggcttaggaaagcgggggctaccctatggtgtgaacggggtgcaaggaaggaggtacttcccttcctactcatcgacaaatcccccgagccttcgtccccacctctacactcccagcccaaccttaattttcagccacaggctggactgtcacccagccgtggtcccaactggcccaaggctcatgggtgtccgcagaggccttgccttcaaacccctcctcctctccccagtcctcagactaagccctttccccagtccccagcccccagccccagggccccccatagcctttgcccaggcttactgcaagcttgtctgcaggcttcaccttgacctcacagcagccccgactctgcctctctatccccaaccccttcccgagtgggtcctaaggccaagaatactcccagcccacctgaggttctactgactccatttgaccaagcccccagaatcacacagtattcccttctggtcctgaccccacctccttccaggcttcagtctctaagggtcccactccaaacccacttacaccccattctgctcagctccccatccgcgggcttctctgtccccgccccctgcctcaggacccgcccaggccacgcccaccacccacctgccatacagatacaggtgaactggcctatgcggtcgaggcacgtggcctggtttcggcagggccccgacagacactcgttgacatcggtctcacagcgaggtccagtgtagccacgaccgcactggcacaggaaggagccctgcgtgttcacgcacctgcccaagtgctcgcaggggttggcgcctgccggatggagtgcgatcggtgtgggcgtggctggccgggaccccctcctctcccctctttcccagcccattcacagacgatggagctcccctcaccgatagagcactcgtccacatcctggtcacatgccccacccgtgaagccgggaggacaggtgcaaatggcccggccgttcaccggatttgtgtcacagatagcatcctcgtggcaggggttgctgacacaggcgtcatccaggtgacacaggaggcctgggaagtggtaagcagaagtcataggcagatcttcctgctctgcccaaaaggcccacaccccttgagtattgttttgtcgttgttgttgttttgttttgttttttgagacgaagtttcgctcttgttgcccaagctggagtacaatagcgcgatcttggctcactgtaacctccacctcccaggttcaagcgattctcctgctcagcctcccgagtagctgggattacaggcatgtgccaccacgcccggctaattttttgtatttttagtagaaacggggtttcaccaagttagccaggttggtctcaaactcctgacctcaggtgatctgcctgcctcagcctcccaaagtgctgggattacaggcgtgagccaccgcgcccggcctgttgtttttattaaacctaaacagtatttagtagctgcttttttaatccatttattatgagaactatcaaacatacagaaaagttgaccattcatatacccaccacctagattcaactattgttagcttaatctaccaatcttcttttctaaaccatttaaaaataaattgcagaccgggcacagtggctcacgtctataatcctagcactttgggaggccaaggtgagtgcatcgcttgagttcaagagttcaagaccagcctgggcaatatagtgagacccgtctctacaaaaaatacaaagcttagccgggcatggtggcgcacgcctgtaatcccagctacttgggggactgaggtgggaggatcacttgagcccaggaagtcgaggctgcagtgagctgagatcatgccactgtactccagcctgggtgacaaagtgagactctgtctcaaaaataaaataaaataaattgcaaacatccacatattgttttaaaaccttttgactcttctgattacaaaagggtcctacactccagcctttgcttctgtaataccctctgccatgtatgccctctttctatatccacgttcccctcctaaacatgttctctgatctttgccacttccaaaggtaactcccaggagttccccattccaatggcttctgccctgagccatgcatcagtgcaatgtcagcctcctcccaagcctctcccaggcttacacttccccactaaagctgcctccagcatcatctttttttctctctcttttttgttatacacggtcttacactgtctcccaggctggaacgcagtggctcagtctcagctcactgcaacctccaccttctgggctcaagccatccttcaaccttagcatccagagtagctgggactacaggcatgcgctaccatgcccagctaattttttgtatttttggtagagatagggttttgccatgttgcccaggctggtctcaaactgctgagctcaagcaatctacccgcctgggcctcccaatgtgttggggttacaggcgtgagccaccacacccagcctaccaagtttttgtagagatgacaaaaactcactatgttgtccaggctggtctcaaagtcctgggcccaagcgatcctcccatcttggcctcccaaagtgctgggattacaggcatgagccactgtgcccggcctagcataatcttttttttattttttaaatttgagaaggagtctcactctgtcacccaggctagagtgcagtggtgcaatcttggctcactgcaatctccacctcctgggttcaagctactctcgtgccttagcctcctgagagacttggattacaggtgtgcaccaccacgcgcagctaatttttgtgtttttagtagagatggggtttcaccatattgaccaggctggtctcaaactcctgaccccagtgatccgcccgcctgggcctcccaaagtgctatgattacaggcatgagccactgtgcccagcctagcataatctttctaacactcaagtcagacttcttatttgccctcactaaaaaccatccatggctccctgcagagaaaacggccactcaccagtcttgcccatggggcaggcacagtagaaagaagccacgcggtcatggcaggtggccccatggaagcacacggctgtggcacagtcatcgatattctgactgcagctctcgcctgtccagccattgacacacacgcagctgtggccacccagcgtgttgaagcaggtacccccattgtggcaggcgttgggctgcagctgacactcatccacgtcctccgtgcagaactggcctgtggcacacagatgcagcagtccagccacctggcgcatgtccacccgaggcctgcctccccgctccctctggccgcagtgcccacctgtccactcaggagggcactggcagttataggtgttgacgccatccacgcatgtccccccattgagacatcggtgtcctggacagtcgtccacgttcacttcacaattctgaccctcaaaccctagcagggaagggggcaaggatggtcaccgccgggctggcctgctgtccccacgcccacccctctgactctcctgagtagggctcactcaccaggaagacaggcacagtcgtaagtgaggtcgccactctgcctgcaggtgcccccgttacggcatggtgagggtgcacagggcaccgcggggttctcacatagtggccctgtgtagccagctggacactggcagcggaaggagccaggtgtgttgaggcaggtgccaccatggcggcagggctcacccacccggcactcatccacgtcgcttcggcagctgcggccctggtagccaggtgggcaggagcagaggaagcgtccatcgggccccactgagcagcgggcaccgtgggcacaagggctgctgaggcagggatctggcagggagcagtcagggcctggagggaccaggacagggtgagtttaggactgaccacacccccgactacctcccctccagactcttcccctctcacctcggaagccacgggggcaccggcatgagaatcgggcggtgccagccaccactgaactctggcagacaccacggccagcacaggggcctgagtgacaggggtcctccagctgacaccgctcacccacccagccaggcgggcacctgtgggcagagatggcttggttgggcagcacagggcaggatggccccagacacaaagatacacacaagacaggcaagaaacacgcagggaaacagagcagcaaacacacatttgctgggagcagtggctcacgcctgtaatcccagaactttgggaggctgcggcgggcagatcacttggggtcaggagttcaagaccagcctagccaacatggtgtaaccccgtctctactaaaagtacgaaactttgctgggcatagtggtgcgtgcctgtagtcccagctactcaagaggctgaggcaggagaattgcttgaactcgggaggtggaggttgcagtgagccaagatcgcgccactgcactgcagcctgggtgacagagtaagactcggtctcaaagaaacaaaacaaaacaaaacacacattcattcatgcaacgaatatttactgagtacctactacgttctgagcaatacaaatacagcaacaaacacaatgaaaggggtccctatccctctggatccttgcagccaggtccaggcaaggagaacatatacgaataacaaattaatatacaacatgctggcagggggcggtgaaagccatcagaaccatgaaggatgtagtcagttgggtcacagcccctgaaaagatgacatccatgtcccagaacctgtgactaggaccttactttttttttaaatggctctttgcagatgtaattttttttttttaagagacggagtcttgctctgtcacccaggctgcagtgcagtggcgcgatcttggctcactgcaacctccacctcccggggttcaagcaattctttgtctcagcctcctgcgtagctgggagtacaggcacacgccaccaggcctggctatgcagatgtaattaaatgagagatgtcaagatgagattattctgaattatccacctgggccctaaattcagtgacaagtgttcatacaagagaacggctcacaactgtaatcccaacactttgggaggtcaagacaggataatcacttcaagccagaagttcaagatcagcttgagcaacatagggagactttttttccacaaaaaaaaattaaaaattataaccgggcatggtggcaggagcctgtaatcccagctactctggaggctgaggcaggagaatcgcttgaacccaggaggcggaggttgcagtgagccgaaattgcaccactgcactccagcctggttgacagagggagactccatctcaaaaaaaaacaaaaaacaaaaaaaacaaacaggccaggcgcagtggctcatgcctgtaatcccagcactctgggagactgaggtgggcggatcacgaggtcaggagttcaagaccagcctggccaatatggtgaaacctcgtcgctactaaaaatacaaaaattagctgggcgtggtggtgcactcgtgtagtccccgctactcaggaggctgagacagaagaattgcttgaacctgggaggcggaggttgcagtaagccgagatcgtgccactgcactccagcctgggtgacagagagagactccacctaaaaaataaaaataaaagattagctggccgtggtggctcacacctgtagtcccagcttcttgggaggctgaggtgggaggatcgcttcagcctgggagttgaaggctgcagtgaactaagattgcaccactgcactccagcctgggtgacagagcaagactctgtctcaaaaaaagagagaggcagccaaaaggagatttgggtgggagaaggaagagaagaagacagagacagggactggagtgagacagccactagctgagaaacgtctggagccaccagaagctgcaagagtcagttctcccctgggtccccatggagaggctcagccctgccgatatcttgatttcagacttccaacctccagaacttcaagagaataaattactattgttcaagctacccagtttatggtaatttgttagagcagccgtaggaagctaaaccacagggttaagggggatagaatgatggggtcaaggaggtggaattctattttcacagacatatgaaggtaaggagggggccatggggctttctggggaacggcattccaggcagagggaacagcaaatgaaaagtctcagacccatgtccaagcgcggtggctcacgcctgtaatcccaacactttgggagaccgaggcaggtagatcacctgacatcaagagttcgagaccagcctgaccaacatgaagaaactccgtctctactaaaaacacaaaaaatcagccaagtgtggtggcacatgcctgtaatcccagctactccggaggctgaggcaggaaaatcgcttgaacccaggagatagaggctgcagtgagccaagatcgagccactgcactccagcctgggcaacaagagcgatactcgatctcaaaaaaaaaaaaaaaaaggaaaaggaaaaaaagaagtctcagaccccaggacacaaccacgcaggcacacacagacaggcccagaaaccacagctacacacacagagggacacaccaattggacgccatggcctggccagcactcaagacaccaacccacagcatcccacgcggaaatgagcaactctcactcacagggacagacagcagggctcccacaaaccctcaagtcccttctctgggacttatatagcctcttatgcagggatgggagggtggagggttggggtactgacaccactgttggtaccctcatcttgggggggtggtccttcaacctgcagccccctccccaagcccaccaaggagtgtgaggaattggaactgggaggggttggtcttaagactggaaatctccaaggggcactagcggggtcagagggaggggcttagagaagccagagagtccaagctccgccccccgacgctgccaaccctcacccccctctatccccccaccctccgcccctggcgcggttgtcctccctccggcttgtcccagacgcctgagactgaactcaacaagcggctgactcagtccttagcgtcacccgcaagatcccccccaccccggcccccagcgaaacaggtcggggcacggccgagcaagcaagggtgcgggtggcgttgggaggggagggcacagctcccgtcccctcctccaaggcccgcagggcgaccactgcggccccgaccgcgcgtcgggagggggcgcgctgcgctgggcgccgaggatagctggtcccaccgccaggcagggcgcgacccgcgcgggccccctcccgacgccccgggcgggttcccacgctctgcgtcccgcgcccccgccgaccggtcgggccggttccagccccagcccgcgccccgccccacggcctaagctttgggggagacggaggggggagcgcagacctagttagggggggcacggcgggtgaggcgaggactaggagatggggacgaggtctatggaaacgtctgctgccggtgggggggtcttgggggatccatgggtggggtgacagcttgggggcatccttgaaaggacttgagtatttgagaccgtgaaagagactcgtggggggtggagggcgtgtagggagtggttcccacagcccaactcggaggactgagcccgctccactccgggcgatccgggctccgggcgccgcgcgcgccggtgattcacctgtcgaagggcggggcagccgcgggctcattcacctgtcggcagtattccaggcgcggagctccactgcgcaggcgcccggccccaccgctcgccctcccaggtgtgtggctccaggtaaggtcacacttttccccatcccgccccaccttcgcagaccccccagccccaggaaaccctctcagtcaggctcagccctccacaaaggtgagcccgagtgggagatccagccaaaataaatgtaggtgtaacttcaaagcggctcttcttggtctaaaatcaccccagacccacccagcttgggcctgacccagtacttggcacacatgatgctgaataaatgaatacattaatgagtcaatcaatggctactgcgtgaactgctgttattaatgatagcatgaaaggagccaagcatttcctcataaccttgagagacttctccttagagcacctgtttcctgcctccctaccattattatttataataatgcctatgttgagcacatactatattctgagcacttaatgtatgttgagtgcatacaggagttattattgccccattttccagatgcaaaaactgaggctcaaaaagcttgaatgctcaaggtgtcccagaccccagaatttaagctgagctctttctgtctctgctcagctccttcccagcctctgctctgctccctgcaacctcttgcctttccttgtgatatctaacaactaaattgttaagtcccttcacagtcgccagtgaagcattccctatttcacaggtgcaatgatgatcagagagggaaagtgactagcccaaagtcacactgcaagtaagtggcagtgtgggactgtattataggcctcctatgtccccctccactaaatgttgagagatgggaggggtgtggagggtgtgagccactgcgattggtccctgatagtttgttgattgaataat
